(19) United States
(12) Patent Application Publication
(10) Pub. No.: US 2016/0010068 A1
(43) Pub. Date: Jan. 14, 2016

(54) FUSION POLYNUCLEOTIDES AND FUSION POLYPEPTIDES ASSOCIATED WITH CANCER AND PARTICULARLY MELANOMA AND THEIR USES AS THERAPEUTIC AND DIAGNOSTIC TARGETS

(71) Applicants: Boris C. BASTIAN, (US); Maureen CRONIN, (US); Jie HE, (US); Doron LIPSON, (US); Philip James STEPHENS, (US); Thomas WIESER, (US); Roman YALENSKY, (US)

(72) Inventors: Boris C. BASTIAN, San Francisco, CA (US); Maureen CRONIN, Cambridge, MA (US); Jie HE, Newton, MA (US); Doron LIPSON, Chestnut Hill, MA (US); James Philip STEPHENS, Lexington, MA (US); Thomas WIESER, New York, NY (US); Roman YALENSKY, Newton, MA (US)

(21) Appl. No.: 14/770,776

(22) PCT Filed: Feb. 24, 2014
(86) PCT No.: PCT/US2014/018120

§ 371 Date: Aug. 26, 2015

Related U.S. Application Data
(60) Provisional application No. 61/768,340, filed on Feb. 22, 2013.

(51) Int. Cl. C12N 9/12; C07K 16/40; C07K 14/47; C07K 14/74; C12Q 1/68; G01N 33/574

(52) U.S. Cl. CPC C12N 9/12; C12Q 1/6886; G01N 33/57496; C07K 14/47; C07K 14/70539; C07K 14/4702; C07K 14/4746; C07K 16/40; C12Q 2600/156; C12Y 207/10001; C12Y 207/11001; C07K 2319/00; C07K 2317/76

(57) ABSTRACT

Novel fusion molecules and uses are disclosed.

[0001] This application is being filed on Feb. 24, 2014, as a PCT International patent application, and claims priority to U.S. Provisional Patent Application No. 61/768,340, filed Feb. 22, 2013, the disclosure of which is incorporated by reference in its entirety.

### GOVERNMENT RIGHTS

[0002] This disclosure was funded in part by grants from the National Institutes of Health R01 CA131524; P01 CA025874; and P30 CA008748. The U.S. government has certain rights in this disclosure.

### SEQUENCE LISTING

[0003] The present application includes a Sequence Listing in electronic form as a txt file in ASCII format titled “60009_{—}0015WOU1SEQ_LIST_ST113.TXT” and having a size of 741 kb. The contents of this txt file are incorporated by reference herein.

### BACKGROUND

[0004] Cancer represents the phenotypic end-point of multiple genetic lesions that endow cells with a full range of biological properties required for tumorigenesis. Indeed, a hallmark genomic feature of many cancers, including, for example, B cell cancer, lung cancer, breast cancer, ovarian cancer, pancreatic cancer, and colon cancer, is the presence of numerous complex chromosome structural aberrations, including translocations, intra-chromosomal inversions, point mutations, deletions, gene copy number changes, gene expression level changes, and germline mutations, among others.

[0005] The need still exists for identifying novel genetic lesions associated with cancer. Such genetic lesions can be an effective approach to develop compositions, methods and assays for evaluating and treating cancer patients.

### SUMMARY

[0006] The invention is based, at least in part, on the discovery of novel rearrangement events that give rise to fusion molecules that includes a fragment of a first gene and a fragment of a second gene, e.g., a fusion that includes a 5′-exon and a 3′-exon summarized in FIGS. 1A-1C. The term “fusion” or “fusion molecule” is used generically herein, and includes any fusion molecule (e.g., gene, gene product (e.g., cDNA, mRNA, or polypeptide), and variant thereof) that includes a fragment of first gene and a fragment of second gene described herein, including, e.g., anTP53-NTRK1, CEP89-BRAF, CLIP1-ROS1, and so on summarized in FIGS. 1A-1C. Expression of the fusion molecules was detected in cancer tissues, thus suggesting an association with neoplastic growth or cancer (including pre-malignant, or malignant and/or metastatic growth).

[0007] Accordingly, the invention provides, at least in part, the following: methods for identifying, assessing or detecting a fusion molecule as described herein; methods for identifying, assessing, evaluating, and/or treating a subject having a cancer, e.g., a cancer having a translocation, manifest as a fusion molecule as described herein, particularly melanoma; isolated fusion nucleic acid molecules, nucleic acid constructs, host cells containing the nucleic acid molecules; purified fusion polypeptides and binding agents; detection reagents (e.g., probes, primers, antibodies, kits, capable. e.g., of specific detection of a fusion nucleic acid or protein); screening assays for identifying molecules that interact with, e.g., inhibit, the fusions, e.g., novel kinase inhibitors; as well as assays and kits for evaluating, identifying, assessing and/or treating a subject having a cancer, e.g., a cancer having a fusion particularly melanoma. The compositions and methods identified herein can be used, for example, to identify new inhibitors; to evaluate, identify or select a subject, e.g., a patient, having a cancer who is a candidate for treatment with these inhibitors; and to treat or prevent or postpone a cancer, such as a melanocytic neoplasm.

[0008] Each of these fusion molecules is described herein in more detail.

### CLIP1-ROS1 Fusions

[0009] In one embodiment, a fusion includes an in-frame fusion of an exon of CAP-GLY domain containing linker protein 1 (CLIP1), e.g., one more exons of CLIP1 (e.g., one or more of exons 1-20 of CLIP1) or a fragment thereof, and an exon of C-Ros oncogene 1 (ROS1), e.g., one or more exons of a ROS1 (e.g., one or more of exons 36-43 of ROS1) or a fragment thereof. For example, the CLIP1-ROS1 fusion can include an in-frame fusion within an intron of CLIP1 (e.g., intron 20) or a fragment thereof, with an intron of ROS1 (e.g., intron 35) or a fragment thereof. In one embodiment, the fusion of the CLIP1-ROS1 fusion comprises the nucleotide sequence of: chromosome 12 at one or more of a nucleotide (plus or minus 10, 20, 30, 50, 60, 70, 80, 100 or more nucleotides) and chromosome 6 at one or more of a nucleotide (plus or minus 10, 20, 30, 50, 60, 70, 80, 100 or more nucleotides). In one embodiment, the CLIP1-ROS1 fusion is a translocation, e.g., a translocation of a portion of chromosome 12 and a portion of chromosome 6.

[0010] In certain embodiments, the CLIP1-ROS1 fusion is in a 5′-CLIP1 to 3′-ROS1 configuration (also referred to herein as “5′-CLIP1-ROS1-3′).” The term “fusion” or “fusion molecule” can refer to a polypeptide or a nucleic acid fusion, depending on the context. It may include a full-length sequence of a fusion or a fragment thereof, e.g., a fusion junction (e.g., a fragment including a portion of CLIP1 and a portion of ROS1, e.g., a portion of the CLIP1-ROS1 fusion described herein). In one embodiment, the CLIP1-ROS1 fusion polypeptide includes a fragment of the amino acid sequence shown in SEQ ID NO:16 and a fragment of the amino acid sequence shown in SEQ ID NO: 12, or an amino acid sequence substantially identical thereto. In another embodiment, the CLIP1-ROS1 fusion nucleic acid includes a fragment of the nucleotide sequence shown in SEQ ID NO: 15 and a fragment of the nucleotide sequence shown in SEQ ID NO: 11, or a nucleotide sequence substantially identical thereto. In one embodiment, the CLIP1-ROS1 fusion polypeptide comprises sufficient CLIP1 and sufficient ROS1 sequence such that the 5′ CLIP1-3′ ROS1 fusion has kinase activity, e.g., has elevated activity, e.g., tyrosine kinase activity, as compared with wild type CLIP1 or ROS1. In any event, the fusion causes activation in the cells harboring of oncogenic signaling pathways.

[0011] In certain embodiments, the CLIP1-ROS1 fusion comprises one or more (or all of) exons 1-20 from CLIP1 and one or more (or all of) exons 36-43 of ROS1 (e.g., one or more of the exons shown in SEQ ID NO:15 and SEQ ID NO: 11. In another embodiment, the CLIP-ROS1 fusion comprises one or more (or all of) exons 1-20 of CLIP1 and one or more (or all of) exons 36-43 of ROS1. In certain embodiments, the CLIP1-ROS1 fusion comprises at least 1, 2, 3, 4, 5, 6, 7, 8, 9, 10, 11, 12, 13, 14, 15, 16, 17, 18, 19, 20 or more exons (or encoded exons) from CLIP1 and at least 1, 2, 3, 4, 5, 6, 7, 8 or more exons (or encoded exons) from ROS1 (e.g., from the CLIP1 and ROS1 sequences shown in SEQ ID NO:15 and SEQ ID NO:16 and SEQ ID NO: 11 and SEQ ID NO:12.

[0012] In certain embodiments, the CLIP1-ROS1 fusion comprises exons 1-20 or a fragment thereof from CLIP1, and exons 36-43 or a fragment thereof from ROS1 (e.g., as shown in SEQ ID NO: 15 and SEQ ID NO:11). In one embodiment, the CLIP1-ROS1 fusion comprises at least 5, 10, 15, 20, 30, 40, 50 or more amino acids from exons 1-20 of CLIP1 (e.g., from the amino acid sequence of CLIP1 as shown in SEQ ID NO:16 (e.g., from the amino acid sequence of CLIP1 preceding the fusion junction with ROS1, and at least 5, 10, 15, 20, 30, 40, 50 or more amino acids from exons 36-43 of ROS1 (e.g., from the amino acid sequence of ROS1 as shown in SEQ ID NO: 12). In another embodiment, the CLIP1-ROS1 fusion comprises at least 6, 12, 15, 20, 25, 50, 75, 100 or more nucleotides from exons 1-20 of CLIP1 (e.g., from the nucleotide sequence of CLIP1 as shown in SEQ ID NO:15 (e.g., from the nucleotide sequence of CLIP preceding the fusion junction with ROS1); and at least 6, 12, 15, 20, 25, 50, 75, 100 or more nucleotides from exons 36-43 of ROS1 (e.g., from the nucleotide sequence of ROS1 as shown in SEQ ID NO: 11).

[0013] In one embodiment, the CLIP1-ROS1 fusion includes the full sequence or a fragment of the nucleotide sequence shown in SEQ ID NO: 13 and SEQ ID NO:92, or a nucleotide sequence substantially identical thereto. In another embodiment, the CLIP1-ROS1 fusion polypeptide includes the full sequence or a fragment of the amino acid sequence shown in SEQ ID NO: 14 and SEQ ID NO:93, or an amino acid sequence substantially identical thereto.

### CLIP1-ROS1 Nucleic Acid Molecules

[0014] In one aspect, the invention features a nucleic acid molecule (e.g., an isolated or purified) nucleic acid molecule that includes a fragment of a CLIP1 gene and a fragment of a ROS1 gene. In one embodiment, the nucleotide sequence encodes a CLIP1-ROS1 fusion polypeptide that includes a tyrosine kinase domain or a functional fragment thereof. In another embodiment, the nucleotide sequence encodes a fragment of the ROS1 polypeptide including the amino acid sequence of SEQ ID NO: 12 or a fragment thereof, or a sequence substantially identical thereto. In other embodiments, the nucleic acid molecule includes a fragment of the CLIP1 gene encoding the amino acid sequence of SEQ ID NO: 16 or a fragment thereof, or a sequence substantially identical thereto. In yet other embodiments, the nucleic acid molecule includes a nucleotide sequence encoding the amino acid sequence shown in SEQ ID NO: 16, or a fragment thereof, and the amino acid sequence shown in SEQ ID NO:12 or a fragment thereof, or a sequence substantially identical thereto.

[0015] In one embodiment, the nucleic acid molecule includes a fusion, e.g., an in-frame fusion, between an intron of CLIP1 (e.g., intron 20, or a fragment thereof), and an intron of ROS1 (e.g., intron 35, or a fragment thereof). The CLIP1-ROS1 fusion can comprise a fusion of the nucleotide sequence of: chromosome 12 at one or more of a nucleotide (plus or minus 10, 20, 30, 50, 60, 70, 80, 100 nucleotides) and chromosome 6 at one or more of a nucleotide (plus or minus 10, 20, 30, 50, 60, 70, 80, 100 nucleotides), or a fragment thereof. In one embodiment, the CLIP1-ROS1 fusion comprises a fusion of the nucleotide sequence of: chromosome 12 at one or more of a nucleotide (plus or minus 10, 20, 30, 50, 60, 70, 80, 100 nucleotides) and chromosome 6 at one or more of a nucleotide (plus or minus 10, 20, 30, 50, 60, 70, 80, 100 nucleotides), or a fragment thereof.

[0016] In another embodiment, the CLIP1-ROS1 fusion comprises a nucleotide sequence (e.g., a fragment of a nucleotide sequence) shown in SEQ ID NO:15 and a nucleotide sequence (e.g., a fragment of a nucleotide sequence) shown in SEQ ID NO: 11, or a fragment of the fusion. In one embodiment, the CLIP1-ROS1 fusion comprises a nucleotide sequence substantially identical to the nucleotide sequence (e.g., a fragment of a nucleotide sequence) shown in SEQ ID NO: 15 and the nucleotide sequence (e.g., a fragment of a nucleotide sequence) shown SEQ ID NO: 11, or a fragment of the fusion. In one embodiment, the CLIP1-ROS1 fusion comprises a nucleotide sequence at least 70%, at least 75%, at least 80%, at least 85%, at least 90%, at least 95%, at least 99%, at least 99.5 or greater, identical to the nucleotide sequence (e.g., a fragment of a nucleotide sequence) shown in SEQ ID NO: 15 and to the nucleotide sequence (e.g., a fragment of a nucleotide sequence) shown in SEQ ID NO:11. In one embodiment, the CLIP1-ROS1 fusion comprises a nucleotide sequence containing at least 25, 50, 100, 150, 200, 500, 1000, 1500, 2000, 2500, 3000, or more nucleotides of the nucleotide sequence shown in SEQ ID NO:15 and a nucleotide sequence containing at least 25, 50, 100, 150, 200, 500, 1000, 1500, 2000, 2500, 3000, or more nucleotides of the nucleotide sequence shown in SEQ ID NO:11. In one embodiment, the CLIP1-ROS1 fusion comprises a nucleotide sequence containing at least 25, 50, 100, 150, 200, 500, 1000, 1500, 2000, 2500, 3000, or more contiguous nucleotides of the nucleotide sequence shown in SEQ ID NO: 15 and a nucleotide sequence containing at least 25, 50, 100, 150, 200, 500, 1000, 1500, 2000, 2500, 3000, or more nucleotides of the nucleotide sequence shown in SEQ ID NO: 11.

[0017] In another embodiment, the nucleic acid molecule includes a fusion, e.g., an in-frame fusion, of at least 1, 2, 3, 4, 5, 6, 7, 8, 9, 10, 11, 12, 13, 14, 15, 16, 17, 18, 19, 20 or more exons of CLIP1 or a fragment thereof (e.g., one or more of exons 1-20 of CLIP1 or a fragment thereof), and at least 1, 2, 3, 4, 5, 6, 7, 8 or more exons of ROS1 or a fragment thereof (e.g., one or more of exons 36-43 of ROS1 or a fragment thereof). In yet other embodiments, the nucleic acid molecule includes a fragment the nucleotide sequence shown in SEQ ID NO: 15 and a fragment of the nucleotide sequence shown in SEQ ID NO:11 or a fragment of the fusion, or a sequence substantially identical thereto.

[0018] In one embodiment, the nucleic acid molecule is complementary to at least a portion of a nucleotide sequence disclosed herein, e.g., is capable of hybridizing under a stringency condition described herein to SEQ ID NO: 15 and/or SEQ ID NO: 11, or a fragment thereof. In yet another embodiment, the nucleic acid molecule hybridizes to a nucleotide sequence that is complementary to at least a portion of a nucleotide sequence disclosed herein, e.g., is capable of hybridizing under a stringency condition to a nucleotide sequence complementary to SEQ ID NO: 15 and/or SEQ ID NO: 11, or a fragment thereof. The nucleotide sequence of a cDNA encoding an exemplary 5′ CLIP1-3′ ROS1 fusion is shown in at least exon 20 (e.g., exons 1-20) of SEQ ID NO:15 and at least exon 36 (e.g., exons 36-43) of SEQ ID NO: 11, and the predicted amino acid sequence is shown in the corresponding encoded exons of SEQ ID NO: 16 and the corresponding encoded exons of SEQ ID NO: 12, respectively.

[0019] In an embodiment the CLIP1-ROS1 nucleic acid molecule comprises sufficient CLIP1 and sufficient ROS1 sequence such that the encoded 5′ CLIP1-3′ ROS1 fusion has kinase activity, e.g., the fusion causes activation in the cells harboring it of oncogenic signaling pathways. In certain embodiments, the 5′ CLIP1-3′ ROS1 fusion comprises exons 1-20 from CLIP1 and exons 36-43 from ROS1. In certain embodiments, the CLIP1-ROS1 fusion comprises at least 1, 2, 3, 4, 5, 6, 7, 8, 9, 10, 11, 12, 13, 14, 15, 16, 17, 18, 19, 20 or more exons from CLIP1 and at least at least 1, 2, 3, 4, 5, 6, 7, 8 or more exons of ROS1. In certain embodiments, the CLIP1-ROS1 fusion comprises a fusion of exon 20 from CLIP1 and exon 36 from ROS1. In another embodiment, the CLIP1-ROS1 fusion comprises 1, 2, 3, 4, 5, 6, 7, 8, 9, 10, 11, 12, 13, 14, 15, 16, 17, 18, 19, 20 or more exons of CLIP1; and at least 1, 2, 3, 4, 5, 6, 7, 8 or more exons of ROS1.

[0020] In one embodiment, the nucleic acid molecule includes a nucleotide sequence that has an in-frame fusion of intron 20 of CLIP1 (e.g., NM_{—}002956) with intron 35 of ROS1 (e.g., NM_{—}002944). In another embodiment, the nucleic acid molecule includes a nucleotide sequence that includes a breakpoint. For example, the nucleic acid molecule includes a nucleotide sequence that includes the fusion junction between the CLIP1 gene and the ROS1 gene, e.g., the breakpoint between intron 20 of CLIP1 and intron 35 of ROS1. In other embodiments, the nucleic acid molecules includes a nucleotide sequence of one or more of nucleotide of chromosome 12 coupled to (e.g., directly or indirectly juxtaposed to) one or more of nucleotide of chromosome 6. In one embodiment, the nucleic acid molecule includes the nucleotide sequence of: chromosome 12 at one or more of a nucleotide plus or minus 10, 20, 30, 40 50, 60, 80, 100, 150 nucleotides and chromosome 6 at one or more of a nucleotide plus or minus 10, 20, 30, 40 50, 60, 80, 100, 150 nucleotides (corresponding to the breakpoint of a CLIP1-ROS1 fusion), or a fragment thereof, or a sequence substantially identical thereto. In one embodiment, the nucleic acid molecule is complementary to at least a portion of a nucleotide sequence disclosed herein, e.g., is capable of hybridizing under a stringency condition described herein to SEQ ID NO:15 and/or SEQ ID NO:11 or a fragment thereof. In yet other embodiment, the nucleic acid molecule hybridizes to a nucleotide sequence that is complementary to at least a portion of a nucleotide sequence disclosed herein, e.g., is capable of hybridizing under a stringency condition described herein to a nucleotide sequence complementary to SEQ ID NO:15 or SEQ ID NO:11 or a fragment thereof.

[0021] In another embodiment, the CLIP1-ROS1 fusion nucleic acid comprises at least 6, 12, 15, 20, 25, 50, 75, 100 or more nucleotides from exon 20 of CLIP1 (e.g., from the nucleotide sequence of CLIP1 preceding the fusion junction with ROS1, e.g., of the CLIP1 sequence shown in SEQ ID NO:15), and at least 6, 12, 15, 20, 25, 50, 75, 100 or more nucleotides from exon 36 of ROS1 (e.g., from the nucleotide sequence of ROS1 following the fusion junction with CLIP1, e.g., of the ROS1 sequence shown in SEQ ID NO: 11).

[0022] In other embodiments, the nucleic acid molecule includes a nucleotide sequence encoding a CLIP1-ROS1 fusion polypeptide that includes a fragment of a CLIP1 gene and a fragment of a ROS1 gene. In one embodiment, the nucleotide sequence encodes a CLIP1-ROS1 fusion polypeptide that includes e.g., a tyrosine kinase domain or a functional fragment thereof. In yet other embodiments, the nucleic acid molecule includes a nucleotide sequence encoding the amino acid sequence (e.g., a fragment of the amino acid sequence) shown in SEQ ID NO:16 and a nucleotide sequence encoding the amino acid sequence (e.g., a fragment of the amino acid sequence) shown in SEQ ID NO:12, or a fragment of the fusion, or a sequence substantially identical thereto. In one embodiment, the encoded CLIP1-ROS1 fusion polypeptide includes a tyrosine kinase domain or a functional fragment thereof.

[0023] In a related aspect, the invention features nucleic acid constructs that include the CLIP1-ROS1 nucleic acid molecules described herein. In certain embodiments, the nucleic acid molecules are operatively linked to a native or a heterologous regulatory sequence. Also included are vectors and host cells that include the CLIP1-ROS1 nucleic acid molecules described herein, e.g., vectors and host cells suitable for producing the nucleic acid molecules and polypeptides described herein.

[0024] In a related aspect, methods of producing the nucleic acid molecules and polypeptides described herein are also described.

[0025] In another aspect, the invention features nucleic acid molecules that reduce or inhibit the expression of a nucleic acid molecule that encodes a CLIP1-ROS1 fusion described herein. Examples of such nucleic acid molecules include, for example, antisense molecules, ribozymes, RNAi, triple helix molecules that hybridize to a nucleic acid encoding CLIP1-ROS1, or a transcription regulatory region of CLIP1-ROS1, and blocks or reduces mRNA expression of CLIP1-ROS1.

### Nucleic Acid Detection and Capturing Reagents

[0026] The invention also features a nucleic acid molecule, e.g., nucleic acid fragment, suitable as probe, primer, bait or library member that includes, flanks, hybridizes to, which are useful for identifying, or are otherwise based on, the CLIP1-ROS1 fusions described herein. In certain embodiments, the probe, primer or bait molecule is an oligonucleotide that allows capture, detection or isolation of a CLIP1-ROS1 fusion nucleic acid molecule described herein. The oligonucleotide can comprise a nucleotide sequence substantially complementary to a fragment of the CLIP1-ROS1 fusion nucleic acid molecules described herein. The sequence identity between the nucleic acid fragment, e.g., the oligonucleotide, and the target CLIP1-ROS1 sequence need not be exact, so long as the sequences are sufficiently complementary to allow the capture, detection or isolation of the target sequence. In one embodiment, the nucleic acid fragment is a probe or primer that includes an oligonucleotide between about 5 and 25, e.g., between 10 and 20, or 10 and 15 nucleotides in length. In other embodiments, the nucleic acid fragment is a bait that includes an oligonucleotide between about 100 to 300 nucleotides, 130 and 230 nucleotides, or 150 and 200 nucleotides, in length.

[0027] In one embodiment, the nucleic acid fragment can be used to identify or capture, e.g., by hybridization, a CLIP1-ROS1 fusion. For example, the nucleic acid fragment can be a probe, a primer, or a bait, for use in identifying or capturing, e.g., by hybridization, a CLIP1-ROS1 fusion described herein. In one embodiment, the nucleic acid fragment can be useful for identifying or capturing a CLIP1-ROS1 breakpoint, e.g., the nucleotide sequence of: chromosome 12 at nucleotide plus or minus 10, 20, 30, 40, 50, 60, 80, 100, 150 nucleotides and chromosome 6 at nucleotide plus or minus 10, 20, 30, 40 50, 60, 80, 100, 150 nucleotides.

[0028] In one embodiment, the nucleic acid fragment hybridizes to a nucleotide sequence within a chromosomal rearrangement that creates an in-frame fusion of intron 20 of CLIP1 with intron 35 of ROS1. In one embodiment, the nucleic acid fragment hybridizes to a nucleotide sequence in the region In other embodiments, the nucleic acid molecules includes a nucleotide sequence in the region of a nucleotide sequence of chromosome 12 coupled to (e.g., juxtaposed to) nucleotides in the region of a nucleotide sequence of chromosome 6. In one embodiment, the nucleic acid fragment hybridizes to a nucleotide sequence that includes a breakpoint, e.g., the nucleotide sequence of: chromosome 12 at nucleotide plus or minus 10, 20, 30, 40, 50, 60, 80, 100, 150 or more nucleotides and chromosome 6 at nucleotide plus or minus 10, 20, 30, 40, 50, 60, 80, 100, 150 or more nucleotides. For example, the nucleic acid fragment can hybridize to a nucleotide sequence that includes the fusion junction between the CLIP1 gene and the ROS1 gene, e.g., a nucleotide sequence that includes a portion of a nucleotide sequence within intron 20 of a CLIP1 gene and intron 35 of a ROS1 gene.

[0029] In another embodiment, the nucleic acid fragment hybridizes to a nucleotide sequence that comprises at least 6, 12, 15, 20, 25, 50, 75, 100, 150 or more nucleotides from exon 20 of CLIP1 (e.g., from the nucleotide sequence of CLIP1 preceding the fusion junction with ROS1, e.g., of the CLIP1 sequence shown in SEQ ID NO: 15), and at least 6, 12, 15, 20, 25, 50, 75, 100, 150 or more nucleotides from exon 36 of ROS1 (e.g., from the nucleotide sequence of ROS1 following the fusion junction with CLIP1, e.g., of the ROS1 sequence shown in SEQ ID NO: 11).

[0030] The probes or primers described herein can be used, for example, for FISH detection or PCR amplification. In one exemplary embodiment where detection is based on PCR, amplification of the CLIP1-ROS1 fusion junction fusion junction can be performed using a primer or a primer pair, e.g., for amplifying a sequence flanking the fusion junctions described herein, e.g., the mutations or the junction of a chromosomal rearrangement described herein, e.g., CLIP1-ROS1.

[0031] In one embodiment, a pair of isolated oligonucleotide primers can amplify a region containing or adjacent to a position in the CLIP1-ROS1 fusion. For example, forward primers can be designed to hybridize to a nucleotide sequence within CLIP1 genomic or mRNA sequence (e.g., a nucleotide sequence within exon 20 of CLIP1 of SEQ ID NO: 15), and the reverse primers can be designed to hybridize to a nucleotide sequence of ROS1 (e.g., a nucleotide sequence within exon 36 of ROS1, of SEQ ID NO:11).

[0032] In another embodiment, the nucleic acid fragments can be used to identify, e.g., by hybridization, a CLIP1-ROS1 fusion. In one embodiment, the nucleic acid fragment hybridizes to a nucleotide sequence that includes a fusion junction between the CLIP transcript and the ROS1 transcript.

[0033] In other embodiments, the nucleic acid fragment includes a bait that comprises a nucleotide sequence that hybridizes to a CLIP1-ROS1 fusion nucleic acid molecule described herein, and thereby allows the capture or isolation said nucleic acid molecule. In one embodiment, a bait is suitable for solution phase hybridization. In other embodiments, a bait includes a binding entity, e.g., an affinity tag, that allows capture and separation, e.g., by binding to a binding entity, of a hybrid formed by a bait and a nucleic acid hybridized to the bait.

[0034] In other embodiments, the nucleic acid fragment includes a library member comprising a CLIP1-ROS1 nucleic acid molecule described herein. In one embodiment, the library member includes a rearrangement that results in a CLIP1-ROS1 fusion described herein.

[0035] The nucleic acid fragment can be detectably labeled with, e.g., a radiolabel, a fluorescent label, a bioluminescent label, a chemiluminescent label, an enzyme label, a binding pair label, or can include an affinity tag; a tag, or identifier (e.g., an adaptor, barcode or other sequence identifier).

### CLIP1-ROS1 Fusion Polypeptides

[0036] In another embodiment, the CLIP1-ROS1 fusion comprises an amino acid sequence (e.g., a fragment of the amino acid sequence) shown in SEQ ID NO:16 and an amino acid sequence (e.g., a fragment of the amino acid sequence) shown in SEQ ID NO: 12, or a fragment of the fusion. In one embodiment, the CLIP1-ROS1 fusion comprises an amino acid sequence substantially identical to the amino acid sequence (e.g., a fragment of the amino acid sequence) shown in SEQ ID NO:16 and the amino acid sequence (e.g., a fragment of the amino acid sequence) shown in SEQ ID NO:12, or a fragment thereof. In one embodiment, the CLIP1-ROS1 fusion comprises an amino acid sequence at least 70%, at least 75%, at least 80%, at least 85%, at least 90%, at least 95%, at least 99%, at least 99.5 or greater, identical to the amino acid sequence (e.g., a fragment of the amino acid sequence) shown in SEQ ID NO: 16 and the amino acid sequence (e.g., a fragment of the amino acid sequence) shown in SEQ ID NO:12. In one embodiment, the CLIP1-ROS1 fusion comprises a sequence containing at least 10, 20, 50, 100, 500, 600, 700, 800, 900, 1000, or more amino acids of the amino acid sequence shown in SEQ ID NO:16 and SEQ ID NO:12. In one embodiment, the CLIP1-ROS1 fusion comprises an amino acid sequence containing at least 5, 10, 20, 50, 100, 500, 600, 700, 800, 900, 1000, or more contiguous amino acids of the amino acid sequence shown in SEQ ID NO:16 and at least 5, 10, 20, 50, 100, 500, 600, 700, 800, 900, 1000, or more contiguous amino acids of the amino acid sequence shown in SEQ ID NO:12. In one embodiment, the 5′ CLIP1-3′ ROS1 fusion polypeptide includes a receptor tyrosine kinase domain or a functional fragment thereof. In an embodiment, the 5′CLIP1-3′ROS1 fusion polypeptide comprises sufficient ROS1 and sufficient CLIP1 sequence such that it has kinase activity, e.g., has elevated activity.

[0037] In another aspect, the invention features a CLIP1-ROS1 fusion polypeptide (e.g., a purified CLIP1-ROS1 fusion polypeptide), a biologically active or antigenic fragment thereof, as well as reagents (e.g., antibody molecules that bind to a CLIP1-ROS1 fusion polypeptide), methods for modulating a CLIP1-ROS1 polypeptide activity and detection of a CLIP1-ROS1 polypeptide.

[0038] In one embodiment, the CLIP1-ROS1 fusion polypeptide has at least one biological activity. In one embodiment, at least one biological activity of the CLIP1-ROS1 fusion polypeptide is reduced or inhibited by an anti-cancer drug, e.g., a CLIP1 inhibitor, a ROS1 inhibitor. In one embodiment, at least one biological activity of the CLIP1-ROS1 fusion polypeptide is reduced or inhibited by a ROS1 inhibitor. In one embodiment, at least one biological activity of the CLIP1-ROS1 fusion polypeptide is reduced or inhibited by a CLIP1 inhibitor. In one embodiment, at least one biological activity of the CLIP1-ROS1 fusion polypeptide is reduced or inhibited by a ROS1 inhibitor, e.g., Ganetespib; Crizotinib; TAE684; AP26113, X-276, X-376, X-396, CH5424802 (AF-802), GSK1838705, ASP3026, PHA-E429, CRL151104A; and additional examples of kinase inhibitors are described in de la Bellacasa R. P. et al, Transl Lung Cancer Res 2013; 2(2):72-86.

[0039] In yet other embodiments, the CLIP1-ROS1 fusion polypeptide is encoded by a nucleic acid molecule described herein. In one embodiment, the CLIP1-ROS1 fusion polypeptide is encoded by an in-frame fusion of intron 20 of CLIP1 with intron 35 of ROS1 (e.g., a sequence on chromosome 12 and a sequence on chromosome 6). In another embodiment, the CLIP1-ROS1 fusion polypeptide includes an amino acid sequence encoded by a nucleotide sequence comprising a fusion junction between the CLIP1 transcript and the ROS1 transcript.

[0040] In certain embodiments, the CLIP1-ROS1 fusion polypeptide comprises one or more of encoded exons 1-20 from CLIP1 and one or more of encoded exons 36-43 of ROS1. In certain embodiments, the CLIP1-ROS1 fusion polypeptide comprises at least 1, 2, 3, 4, 5, 6, 7, 8, 9, 10, 11, 12, 13, 14, 15, 16, 17, 18, 19, 20 or more encoded exons of CLIP1 and at least at least 1, 2, 3, 4, 5, 6, 7, 8 or more encoded exons of ROS1. In certain embodiments, the CLIP1-ROS1 fusion polypeptide comprises a fusion of encoded exon 20 from CLIP1 and encoded exon 36 from ROS1 (or a fragment thereof). In other embodiments, the fusion comprises at least 1, 2, 3, 4, 5, 6, 7, 8, 9, 10, 11, 12, 13, 14, 15, 16, 17, 18, 19, 20 or more encoded exons of CLIP1; and at least 1, 2, 3, 4, 5, 6, 7, 8 or more encoded exons of ROS1. In certain embodiments, the CLIP1-ROS1 fusion polypeptide comprises encoded exons 1-20 from CLIP1 and exons 36-43 of ROS1. In certain embodiments, the 5′ CLIP1-3′ ROS1 fusion polypeptide comprises a fusion junction of the sequence of exon 20 from CLIP1 and the sequence of exon 36 from ROS1.

[0041] In certain embodiments, the CLIP1-ROS1 fusion comprises the amino acid sequence corresponding to exon 20 or a fragment thereof from CLIP1, and the amino acid sequence corresponding to exon 36 or a fragment thereof from ROS1 (e.g., as shown in SEQ ID NO: 16 and SEQ ID NO:12). In one embodiment, the CLIP1-ROS1 fusion comprises at least 5, 10, 15, 20 or more amino acids from exon 20 of CLIP1 (e.g., from the amino acid sequence of CLIP1 preceding the fusion junction with ROS1, e.g., of the CLIP1 sequence shown in SEQ ID NO:16), and at least 5, 10, 15, 20 or more amino acids from exon 36 of ROS1 (e.g., from the amino acid sequence of ROS1 following the fusion junction with CLIP1, e.g., of the ROS1 sequence shown in SEQ ID NO: 12).

[0042] In one embodiment, the CLIP1-ROS1 fusion polypeptide includes a tyrosine kinase domain or a functional fragment thereof. In a related aspect, the invention features CLIP1-ROS1 fusion polypeptide or fragments operatively linked to heterologous polypeptides to form fusion proteins.

[0043] In another embodiment, the CLIP1-ROS1 fusion polypeptide or fragment is a peptide, e.g., an immunogenic peptide or protein. This peptide or protein contains a fusion junction described herein. Such immunogenic peptides or proteins can be used to raise antibodies specific to the fusion protein. In other embodiments, such immunogenic peptides or proteins can be used for vaccine preparation. The vaccine preparation can include other components, e.g., an adjuvant.

[0044] In another aspect, the invention features antibody molecules that bind to a CLIP1-ROS1 fusion polypeptide or fragment described herein. In embodiments, the antibody can distinguish wild type ROS1 (or CLIP1) from CLIP1-ROS1.

### Detection Reagents and Detection of Mutations

[0045] In another aspect, the invention features a detection reagent, e.g., a purified or an isolated preparation thereof. Detection reagents can distinguish a nucleic acid, or protein sequence, having a breakpoint, e.g., a CLIP1-ROS1 breakpoint; from a reference sequence. In one embodiment, the detection reagent detects (e.g., specifically detects) a CLIP1-ROS1 fusion nucleic acid or a polypeptide, e.g., distinguishes a wild type ROS1 or another ROS1 fusion (or CLIP1) from a CLIP1-ROS1 nucleic acid (e.g., as described herein in SEQ ID NO: 15 and SEQ ID NO: 11); or a CLIP1-ROS1 polypeptide (e.g., as described herein in SEQ ID NO: 16 and SEQ ID NO: 12).

[0046] Detection reagents, e.g., nucleic acid-based detection reagents, can be used to identify mutations in a target nucleic acid. e.g., DNA, e.g., genomic DNA or cDNA, or RNA, e.g., in a sample, e.g., a sample of nucleic acid derived from a neoplastic or tumor cell, e.g., a melanocytic neoplasm, melanoma or metastatic cell. Detection reagents, e.g., antibody-based detection reagents, can be used to identify mutations in a target protein, e.g., in a sample, e.g., a sample of protein derived from, or produced by, a neoplastic or tumor cell, e.g., a melanocytic neoplasm, melanoma or metastatic cell.

### Method of Treatment

[0047] In a related aspect, a method of inhibiting, reducing, or treating a hyperproliferative disorder, e.g., a neoplasm (including benign, pre-malignant or malignant (e.g., a cancer), in a subject is provided. The method includes administering to the subject a preselected therapeutic agent, e.g., an anti-cancer agent (e.g., a kinase inhibitor), as a single agent, or in combination, in an amount sufficient to reduce, inhibit or treat the activity or expression of CLIP1-ROS1 (e.g., a CLIP1-ROS1 fusion described herein), thereby inhibiting, reducing, or treating the hyperproliferative disorder in the subject.

[0048] In one embodiment, the subject treated has a CLIP1-ROS1 fusion; e.g., the subject has a tumor or cancer harboring a CLIP1-ROS1 fusion. In other embodiments, the subject has been previously identified as having a CLIP1-ROS1 fusion. In yet other embodiments, the subject has been previously identified as being likely or unlikely to respond to treatment with a protein kinase inhibitor, e.g., a subject that has previously participated in a clinical trial. In other embodiments, the subject has been previously identified as being likely or unlikely to respond to treatment with a protein kinase inhibitor, based on the presence of the CLIP1-ROS1 fusion. In one embodiment, the subject is a mammal, e.g., a human. In one embodiment, the subject has, or at risk of having a cancer at any stage of disease. In other embodiments, the subject is a patient, e.g., a cancer patient.

[0049] In certain embodiments, the neoplasm or neoplastic cell is a benign, pre-malignant, malignant (cancer) or metastasis. In certain embodiments, the cancer is a solid tumor, a soft tissue tumor, or a metastatic lesion.

[0050] In one embodiment, the neoplasm or neoplastic cell is a benign, pre-malignant, malignant (cancer) or metastasis. In certain embodiments, the cancer is a solid tumor, a soft tissue tumor, or a metastatic lesion. In one embodiment, the cancer is a carcinoma. In one embodiment, the cancer is chosen from a lung cancer, a pancreatic cancer, melanoma, a colorectal cancer, an esophageal-gastric cancer, a thyroid cancer, or an adenocarcinoma. In one embodiment, the cancer is a lung adenocarcinoma. In other embodiment, the lung cancer is chosen from one or more of the following: non-small cell lung cancer (NSCLC), small cell lung cancer (SCLC), squamous cell carcinoma (SCC), adenocarcinoma of the lung, bronchogenic carcinoma, or a combination thereof. In one embodiment, the lung cancer is NSCLC or SCC.

[0051] In one embodiment, the anti-cancer agent is a ROS1 inhibitor. In one embodiment, the anti-cancer agent is a CLIP1 inhibitor. In one embodiment, the anti-cancer agent is a kinase inhibitor. In one embodiment, the anti-cancer agent is a ROS1 inhibitor, e.g., Ganetespib; Crizotinib; TAE684; AP26113, X-276, X-376, X-396, CH5424802 (AF-802), GSK1838705, ASP3026, PHA-E429, CRL151104; and additional examples of kinase inhibitors are described in de la Bellacasa R. P. et al, Transl Lung Cancer Res 2013; 2(2):72-86.

### PPFIBP1-ROS1 Fusions

[0052] In one embodiment, a fusion includes an in-frame fusion of an exon of PTPRF interacting protein binding protein 1 (liprin beta 1) (PPFIBP1), e.g., one more exons of PPFIBP1 (e.g., one or more of exons 1-9 of PPFIBP1) or a fragment thereof, and an exon of C-Ros oncogene 1 (ROS1), e.g., one or more exons of a ROS1 (e.g., one or more of exons 35-43 of ROS1) or a fragment thereof. For example, the PPFIBP1-ROS1 fusion can include an in-frame fusion within an intron of PPFIBP1 (e.g., intron 9) or a fragment thereof, with an intron of ROS1 (e.g., intron 34) or a fragment thereof. In one embodiment, the fusion of the PPFIBP1-ROS1 fusion comprises the nucleotide sequence of: chromosome 12 at one or more of a nucleotide (plus or minus 10, 20, 30, 50, 60, 70, 80, 100 or more nucleotides) and chromosome 6 at one or more of a nucleotide (plus or minus 10, 20, 30, 50, 60, 70, 80, 100 or more nucleotides). In one embodiment, the PPFIBP1-ROS1 fusion is a translocation, e.g., a translocation of a portion of chromosome 12 and a portion of chromosome 6.

[0053] In certain embodiments, the PPFIBP1-ROS1 fusion is in a 5′-PPFIBP1 to 3′-ROS1 configuration (also referred to herein as “5′-PPFIBP1-ROS1-3′).” The term “fusion” or “fusion molecule” can refer to a polypeptide or a nucleic acid fusion, depending on the context. It may include a full-length sequence of a fusion or a fragment thereof, e.g., a fusion junction (e.g., a fragment including a portion of PPFIBP1 and a portion of ROS1, e.g., a portion of the PPFIBP1-ROS1 fusion described herein). In one embodiment, the PPFIBP1-ROS1 fusion polypeptide includes a fragment of the amino acid sequence shown in SEQ ID NO:20 and a fragment of the amino acid sequence shown in SEQ ID NO:12, or an amino acid sequence substantially identical thereto. In another embodiment, the PPFIBP1-ROS1 fusion nucleic acid includes a fragment of the nucleotide sequence shown in SEQ ID NO: 19 and a fragment of the nucleotide sequence shown in SEQ ID NO:11, or a nucleotide sequence substantially identical thereto. In one embodiment, the PPFIBP1-ROS1 fusion polypeptide comprises sufficient PPFIBP1 and sufficient ROS1 sequence such that the 5′ PPFIBP1-3′ ROS1 fusion has kinase activity, e.g., has elevated activity, e.g., tyrosine kinase activity and in any event, it causes activation in the cells harboring this fusion of oncogenic signalling pathways.

[0054] In certain embodiments, the PPFIBP1-ROS1 fusion comprises one or more (or all of) exons 1-9 from PPFIBP1 and one or more (or all of) exons 35-43 of ROS1 (e.g., one or more of the exons shown in SEQ ID NO:19 and SEQ ID NO: 11. In another embodiment, the PPFIBP1-ROS1 fusion comprises one or more (or all of) exons 1-9 of PPFIBP1 and one or more (or all of) exons 35-43 of ROS1. In certain embodiments, the PPFIBP1-ROS1 fusion comprises at least 1, 2, 3, 4, 5, 6, 7, 8, 9 or more exons (or encoded exons) from PPFIBP1 and at least 1, 2, 3, 4, 5, 6, 7, 8, 9 or more exons (or encoded exons) from ROS1 (e.g., from the PPFIBP1 and ROS1 sequences shown in SEQ ID NO: 19 and SEQ ID NO:20 and SEQ ID NO:11 and SEQ ID NO:12.

[0055] In certain embodiments, the PPFIBP1-ROS1 fusion comprises exons 1-9 or a fragment thereof from PPFIBP1, and exons 35-43 or a fragment thereof from ROS1 (e.g., as shown in SEQ ID NO:19 and SEQ ID NO: 11). In one embodiment, the PPFIBP1-ROS1 fusion comprises at least 5, 10, 15, 20, 30, 40, 50 or more amino acids from exons 1-9 of PPFIBP1 (e.g., from the amino acid sequence of PPFIBP1 as shown in SEQ ID NO:20 (e.g., from the amino acid sequence of PPFIBP1 preceding the fusion junction with ROS1, and at least 5, 10, 15, 20, 30, 40, 50 or more amino acids from exons 35-43 of ROS1 (e.g., from the amino acid sequence of ROS1 as shown in SEQ ID NO: 12). In another embodiment, the PPFIBP1-ROS1 fusion comprises at least 6, 12, 15, 20, 25, 50, 75, 100 or more nucleotides from exons 1-9 of PPFIBP1 (e.g., from the nucleotide sequence of PPFIBP1 as shown in SEQ ID NO: 19 (e.g., from the nucleotide sequence of PPFIBP1 preceding the fusion junction with ROS1); and at least 6, 12, 15, 20, 25, 50, 75, 100 or more nucleotides from exons 35-43 of ROS1 (e.g., from the nucleotide sequence of ROS1 as shown in SEQ ID NO: 11).

### PPFIBP1-ROS1 Nucleic Acid Molecules

[0056] In one aspect, the invention features a nucleic acid molecule (e.g., an isolated or purified) nucleic acid molecule that includes a fragment of a PPFIBP1 gene and a fragment of a ROS1 gene. In one embodiment, the nucleotide sequence encodes a PPFIBP1-ROS1 fusion polypeptide that includes a tyrosine kinase domain or a functional fragment thereof. In another embodiment, the nucleotide sequence encodes a fragment of the ROS1 polypeptide including the amino acid sequence of SEQ ID NO: 12 or a fragment thereof, or a sequence substantially identical thereto. In other embodiments, the nucleic acid molecule includes a fragment of the PPFIBP1 gene encoding the amino acid sequence of SEQ ID NO:20 or a fragment thereof, or a sequence substantially identical thereto. In yet other embodiments, the nucleic acid molecule includes a nucleotide sequence encoding the amino acid sequence shown in SEQ ID NO:20, or a fragment thereof, and the amino acid sequence shown in SEQ ID NO: 12 or a fragment thereof, or a sequence substantially identical thereto.

[0057] In one embodiment, the nucleic acid molecule includes a fusion, e.g., an in-frame fusion, between an intron of PPFIBP1 (e.g., intron 9, or a fragment thereof), and an intron of ROS1 (e.g., intron 34, or a fragment thereof). The PPFIBP1-ROS1 fusion can comprise a fusion of the nucleotide sequence of: chromosome 12 at one or more of a nucleotide (plus or minus 10, 20, 30, 50, 60, 70, 80, 100 nucleotides) and chromosome 6 at one or more of a nucleotide (plus or minus 10, 20, 30, 50, 60, 70, 80, 100 nucleotides), or a fragment thereof. In one embodiment, the PPFIBP1-ROS1 fusion comprises a fusion of the nucleotide sequence of: chromosome 12 at one or more of a nucleotide (plus or minus 10, 20, 30, 50, 60, 70, 80, 100 nucleotides) and chromosome 6 at one or more of a nucleotide (plus or minus 10, 20, 30, 50, 60, 70, 80, 100 nucleotides), or a fragment thereof.

[0058] In another embodiment, the PPFIBP1-ROS1 fusion comprises a nucleotide sequence (e.g., a fragment of a nucleotide sequence) shown in SEQ ID NO:19 and a nucleotide sequence (e.g., a fragment of a nucleotide sequence) shown in SEQ ID NO: 11, or a fragment of the fusion. In one embodiment, the PPFIBP1-ROS1 fusion comprises a nucleotide sequence substantially identical to the nucleotide sequence (e.g., a fragment of a nucleotide sequence) shown in SEQ ID NO: 19 and the nucleotide sequence (e.g., a fragment of a nucleotide sequence) shown SEQ ID NO: 11, or a fragment of the fusion. In one embodiment, the PPFIBP1-ROS1 fusion comprises a nucleotide sequence at least 70%, at least 75%, at least 80%, at least 85%, at least 90%, at least 95%, at least 99%, at least 99.5 or greater, identical to the nucleotide sequence (e.g., a fragment of a nucleotide sequence) shown in SEQ ID NO: 19 and to the nucleotide sequence (e.g., a fragment of a nucleotide sequence) shown in SEQ ID NO: 11. In one embodiment, the PPFIBP1-ROS1 fusion comprises a nucleotide sequence containing at least 25, 50, 100, 150, 200, 500, 1000, 1500, 2000, 2500, 3000, or more nucleotides of the nucleotide sequence shown in SEQ ID NO: 19 and a nucleotide sequence containing at least 25, 50, 100, 150, 200, 500, 1000, 1500, 2000, 2500, 3000, or more nucleotides of the nucleotide sequence shown in SEQ ID NO:11. In one embodiment, the PPFIBP1-ROS1 fusion comprises a nucleotide sequence containing at least 25, 50, 100, 150, 200, 500, 1000, 1500, 2000, 2500, 3000, or more contiguous nucleotides of the nucleotide sequence shown in SEQ ID NO: 19 and a nucleotide sequence containing at least 25, 50, 100, 150, 200, 500, 1000, 1500, 2000, 2500, 3000, or more nucleotides of the nucleotide sequence shown in SEQ ID NO:11.

[0059] In another embodiment, the nucleic acid molecule includes a fusion, e.g., an in-frame fusion, of at least 1, 2, 3, 4, 5, 6, 7, 8, 9 or more exons of PPFIBP1 or a fragment thereof (e.g., one or more of exons 1-9 of PPFIBP1 or a fragment thereof), and at least 1, 2, 3, 4, 5, 6, 7, 8, 9 or more exons of ROS1 or a fragment thereof (e.g., one or more of exons 35-43 of ROS1 or a fragment thereof). In yet other embodiments, the nucleic acid molecule includes a fragment the nucleotide sequence shown in SEQ ID NO:19 and a fragment of the nucleotide sequence shown in SEQ ID NO:11 or a fragment of the fusion, or a sequence substantially identical thereto.

[0060] In one embodiment, the nucleic acid molecule is complementary to at least a portion of a nucleotide sequence disclosed herein, e.g., is capable of hybridizing under a stringency condition described herein to SEQ ID NO: 19 and/or SEQ ID NO: 11, or a fragment thereof. In yet another embodiment, the nucleic acid molecule hybridizes to a nucleotide sequence that is complementary to at least a portion of a nucleotide sequence disclosed herein, e.g., is capable of hybridizing under a stringency condition to a nucleotide sequence complementary to SEQ ID NO: 19 and/or SEQ ID NO: 11, or a fragment thereof. The nucleotide sequence of a cDNA encoding an exemplary 5′ PPFIBP1-3′ ROS1 fusion is shown in at least exon 9 (e.g., exons 1-9) of SEQ ID NO:19 and at least exon 35 (e.g., exons 35-43) of SEQ ID NO: 11, and the predicted amino acid sequence is shown in the corresponding encoded exons of SEQ ID NO:20 and the corresponding encoded exons of SEQ ID NO: 12, respectively.

[0061] In an embodiment the PPFIBP1-ROS1 nucleic acid molecule comprises sufficient PPFIBP1 and sufficient ROS1 sequence such that the encoded 5′ PPFIBP1-3′ ROS1 fusion has kinase activity, e.g., has elevated activity. In any event, the fusion causes activation in the cells harboring it of oncogenic signalling pathways. In certain embodiments, the 5′ PPFIBP1-3′ ROS1 fusion comprises exons 1-9 from PPFIBP1 and exons 35-43 from ROS1. In certain embodiments, the PPFIBP1-ROS1 fusion comprises at least 1, 2, 3, 4, 5, 6, 7, 8, 9 or more exons from PPFIBP1 and at least at least 1, 2, 3, 4, 5, 6, 7, 8, 9 or more exons of ROS1. In certain embodiments, the PPFIBP1-ROS1 fusion comprises a fusion of exon 9 from PPFIBP1 and exon 35 from ROS1. In another embodiment, the PPFIBP1-ROS1 fusion comprises 1, 2, 3, 4, 5, 6, 7, 8, 9 or more exons of PPFIBP1; and at least 1, 2, 3, 4, 5, 6, 7, 8, 9 or more exons of ROS1.

[0062] In one embodiment, the nucleic acid molecule includes a nucleotide sequence that has an in-frame fusion of intron 9 of PPFIBP1 (e.g., NM_{—}003622 with intron 34 of ROS1 (e.g., NM_{—}002944). In another embodiment, the nucleic acid molecule includes a nucleotide sequence that includes a breakpoint. For example, the nucleic acid molecule includes a nucleotide sequence that includes the fusion junction between the PPFIBP1 gene and the ROS1 gene, e.g., the breakpoint between intron 9 of PPFIBP1 and intron 34 of ROS1. In other embodiments, the nucleic acid molecules includes a nucleotide sequence of one or more of nucleotide of chromosome 12 coupled to (e.g., directly or indirectly juxtaposed to) one or more of nucleotide of chromosome 6. In one embodiment, the nucleic acid molecule includes the nucleotide sequence of: chromosome 12 at one or more of a nucleotide plus or minus 10, 20, 30, 40 50, 60, 80, 100, 150 nucleotides and chromosome 6 at one or more of a nucleotide plus or minus 10, 20, 30, 40, 50, 60, 80, 100, 150 nucleotides (corresponding to the breakpoint of a PPFIBP1-ROS1 fusion), or a fragment thereof, or a sequence substantially identical thereto. In one embodiment, the nucleic acid molecule is complementary to at least a portion of a nucleotide sequence disclosed herein, e.g., is capable of hybridizing under a stringency condition described herein to SEQ ID NO: 19 and/or SEQ ID NO: 11 or a fragment thereof. In yet other embodiment, the nucleic acid molecule hybridizes to a nucleotide sequence that is complementary to at least a portion of a nucleotide sequence disclosed herein, e.g., is capable of hybridizing under a stringency condition described herein to a nucleotide sequence complementary to SEQ ID NO: 19 or SEQ ID NO: 11 or a fragment thereof.

[0063] In another embodiment, the PPFIBP1-ROS1 fusion nucleic acid comprises at least 6, 12, 15, 20, 25, 50, 75, 100 or more nucleotides from exon 9 of PPFIBP1 (e.g., from the nucleotide sequence of PPFIBP1 preceding the fusion junction with ROS1, e.g., of the PPFIBP1 sequence shown in SEQ ID NO:19), and at least 6, 12, 15, 20, 25, 50, 75, 100 or more nucleotides from exon 35 of ROS1 (e.g., from the nucleotide sequence of ROS1 following the fusion junction with PPFIBP1, e.g., of the ROS sequence shown in SEQ ID NO: 12).

[0064] In other embodiments, the nucleic acid molecule includes a nucleotide sequence encoding a PPFIBP1-ROS1 fusion polypeptide that includes a fragment of a PPFIBP1 gene and a fragment of a ROS1 gene. In one embodiment, the nucleotide sequence encodes a PPFIBP1-ROS1 fusion polypeptide that includes e.g., a tyrosine kinase domain or a functional fragment thereof. In yet other embodiments, the nucleic acid molecule includes a nucleotide sequence encoding the amino acid sequence (e.g., a fragment of the amino acid sequence) shown in SEQ ID NO:20 and a nucleotide sequence encoding the amino acid sequence (e.g., a fragment of the amino acid sequence) shown in SEQ ID NO: 12, or a fragment of the fusion, or a sequence substantially identical thereto. In one embodiment, the encoded PPFIBP1-ROS1 fusion polypeptide includes a tyrosine kinase domain or a functional fragment thereof.

[0065] In a related aspect, the invention features nucleic acid constructs that include the PPFIBP1-ROS1 nucleic acid molecules described herein. In certain embodiments, the nucleic acid molecules are operatively linked to a native or a heterologous regulatory sequence. Also included are vectors and host cells that include the PPFIBP1-ROS1 nucleic acid molecules described herein, e.g., vectors and host cells suitable for producing the nucleic acid molecules and polypeptides described herein.

[0066] In a related aspect, methods of producing the nucleic acid molecules and polypeptides described herein are also described.

[0067] In another aspect, the invention features nucleic acid molecules that reduce or inhibit the expression of a nucleic acid molecule that encodes a PPFIBP1-ROS1 fusion described herein. Examples of such nucleic acid molecules include, for example, antisense molecules, ribozymes. RNAi, triple helix molecules that hybridize to a nucleic acid encoding PPFIBP1-ROS1, or a transcription regulatory region of PPFIBP1-ROS1, and blocks or reduces mRNA expression of PPFIBP1-ROS1.

[0068] In one embodiment, the PPFIBP1-ROS1 fusion includes the full sequence or a fragment of the nucleotide sequence shown in SEQ ID NO:17 and SEQ ID NO:86, or a nucleotide sequence substantially identical thereto, e.g., 70% identical or 80% or 90% or more identical. In another embodiment, the PPFIBP1-ROS1 fusion polypeptide includes the full sequence or a fragment of the amino acid sequence shown in SEQ ID NO: 18 and SEQ ID NO:87, or an amino acid sequence substantially identical thereto.

### Nucleic Acid Detection and Capturing Reagents

[0069] The invention also features a nucleic acid molecule, e.g., nucleic acid fragment, suitable as probe, primer, bait or library member that includes, flanks, hybridizes to, which are useful for identifying, or are otherwise based on, the PPFIBP1-ROS1 fusions described herein. In certain embodiments, the probe, primer or bait molecule is an oligonucleotide that allows capture, detection or isolation of a PPFIBP1-ROS1 fusion nucleic acid molecule described herein. The oligonucleotide can comprise a nucleotide sequence substantially complementary to a fragment of the PPFIBP1-ROS1 fusion nucleic acid molecules described herein. The sequence identity between the nucleic acid fragment, e.g., the oligonucleotide, and the target PPFIBP1-ROS1 sequence need not be exact, so long as the sequences are sufficiently complementary to allow the capture, detection or isolation of the target sequence. In one embodiment, the nucleic acid fragment is a probe or primer that includes an oligonucleotide between about 5 and 25, e.g., between 10 and 20, or 10 and 15 nucleotides in length. In other embodiments, the nucleic acid fragment is a bait that includes an oligonucleotide between about 100 to 300 nucleotides, 130 and 230 nucleotides, or 150 and 200 nucleotides, in length.

[0070] In one embodiment, the nucleic acid fragment can be used to identify or capture. e.g., by hybridization, a PPFIBP1-ROS1 fusion. For example, the nucleic acid fragment can be a probe, a primer, or a bait, for use in identifying or capturing, e.g., by hybridization, a PPFIBP1-ROS1 fusion described herein. In one embodiment, the nucleic acid fragment can be useful for identifying or capturing a PPFIBP1-ROS1 breakpoint, e.g., the nucleotide sequence of: chromosome 12 at nucleotide plus or minus 10, 20, 30, 40, 50, 60, 80, 100, 150 nucleotides and chromosome 6 at nucleotide plus or minus 10, 20, 30, 40 50, 60, 80, 100, 150 nucleotides.

[0071] In one embodiment, the nucleic acid fragment hybridizes to a nucleotide sequence within a chromosomal rearrangement that creates an in-frame fusion of intron 9 of PPFIBP1 with intron 34 of ROS1. In one embodiment, the nucleic acid fragment hybridizes to a nucleotide sequence in the region In other embodiments, the nucleic acid molecules includes a nucleotide sequence in the region of a nucleotide sequence of chromosome 12 coupled to (e.g., juxtaposed to) nucleotides in the region of a nucleotide sequence Y of chromosome 6. In one embodiment, the nucleic acid fragment hybridizes to a nucleotide sequence that includes a breakpoint, e.g., the nucleotide sequence of: chromosome 12 at nucleotide plus or minus 10, 20, 30, 40, 50, 60, 80, 100, 150 or more nucleotides and chromosome 6 at nucleotide plus or minus 10, 20, 30, 40, 50, 60, 80, 100, 150 or more nucleotides. For example, the nucleic acid fragment can hybridize to a nucleotide sequence that includes the fusion junction between the PPFIBP1 gene and the ROS1 gene, e.g., a nucleotide sequence that includes a portion of a nucleotide sequence within intron 9 of a PPFIBP1 gene and intron 34 of a ROS1 gene.

[0072] In another embodiment, the nucleic acid fragment hybridizes to a nucleotide sequence that comprises at least 6, 12, 15, 20, 25, 50, 75, 100, 150 or more nucleotides from exon 9 of PPFIBP1 (e.g., from the nucleotide sequence of PPFIBP1 preceding the fusion junction with ROS1, e.g., of the PPFIBP1 sequence shown in SEQ ID NO: 19), and at least 6, 12, 15, 20, 25, 50, 75, 100, 150 or more nucleotides from exon 35 of ROS1 (e.g., from the nucleotide sequence of ROS1 following the fusion junction with PPFIBP1, e.g., of the ROS1 sequence shown in SEQ ID NO: 11).

[0073] The probes or primers described herein can be used, for example, for FISH detection or PCR amplification. In one exemplary embodiment where detection is based on PCR, amplification of the PPFIBP1-ROS1 fusion junction fusion junction can be performed using a primer or a primer pair, e.g., for amplifying a sequence flanking the fusion junctions described herein, e.g., the mutations or the junction of a chromosomal rearrangement described herein, e.g., PPFIBP1-ROS1.

[0074] In one embodiment, a pair of isolated oligonucleotide primers can amplify a region containing or adjacent to a position in the PPFIBP1-ROS1 fusion. For example, forward primers can be designed to hybridize to a nucleotide sequence within PPFIBP1 genomic or mRNA sequence (e.g., a nucleotide sequence within exon 9 of PPFIBP1 of SEQ ID NO: 19), and the reverse primers can be designed to hybridize to a nucleotide sequence of ROS1 (e.g., a nucleotide sequence within exon 35 of ROS1, of SEQ ID NO: 1).

[0075] In another embodiment, the nucleic acid fragments can be used to identify, e.g., by hybridization, a PPFIBP1-ROS1 fusion. In one embodiment, the nucleic acid fragment hybridizes to a nucleotide sequence that includes a fusion junction between the PPFIBP1 transcript and the ROS1 transcript.

[0076] In other embodiments, the nucleic acid fragment includes a bait that comprises a nucleotide sequence that hybridizes to a PPFIBP1-ROS1 fusion nucleic acid molecule described herein, and thereby allows the capture or isolation said nucleic acid molecule. In one embodiment, a bait is suitable for solution phase hybridization. In other embodiments, a bait includes a binding entity. e.g., an affinity tag, that allows capture and separation, e.g., by binding to a binding entity, of a hybrid formed by a bait and a nucleic acid hybridized to the bait.

[0077] In other embodiments, the nucleic acid fragment includes a library member comprising a PPFIBP1-ROS1 nucleic acid molecule described herein. In one embodiment, the library member includes a rearrangement that results in a PPFIBP1-ROS1 fusion described herein.

[0078] The nucleic acid fragment can be detectably labeled with, e.g., a radiolabel, a fluorescent label, a bioluminescent label, a chemiluminescent label, an enzyme label, a binding pair label, or can include an affinity tag; a tag, or identifier (e.g., an adaptor, barcode or other sequence identifier).

### PPFIBP1-ROS1 Fusion Polypeptides

[0079] In another embodiment, the PPFIBP1-ROS1 fusion comprises an amino acid sequence (e.g., a fragment of the amino acid sequence) shown in SEQ ID NO:20 and an amino acid sequence (e.g., a fragment of the amino acid sequence) shown in SEQ ID NO: 12, or a fragment of the fusion. In one embodiment, the PPFIBP1-ROS1 fusion comprises an amino acid sequence substantially identical to the amino acid sequence (e.g., a fragment of the amino acid sequence) shown in SEQ ID NO:20 and the amino acid sequence (e.g., a fragment of the amino acid sequence) shown in SEQ ID NO:12, or a fragment thereof. In one embodiment, the PPFIBP1-ROS1 fusion comprises an amino acid sequence at least 70%, at least 75%, at least 80%, at least 85%, at least 90%, at least 95%, at least 99%, at least 99.5 or greater, identical to the amino acid sequence (e.g., a fragment of the amino acid sequence) shown in SEQ ID NO:20 and the amino acid sequence (e.g., a fragment of the amino acid sequence) shown in SEQ ID NO:12. In one embodiment, the PPFIBP1-ROS1 fusion comprises a sequence containing at least 10, 20, 50, 100, 500, 600, 700, 800, 900, 1000, or more amino acids of the amino acid sequence shown in SEQ ID NO:20 and SEQ ID NO: 12. In one embodiment, the PPFIBP1-ROS1 fusion comprises an amino acid sequence containing at least 5, 10, 20, 50, 100, 500, 600, 700, 800, 900, 1000, or more contiguous amino acids of the amino acid sequence shown in SEQ ID NO:20 and at least 5, 10, 20, 50, 100, 500, 600, 700, 800, 900, 1000, or more contiguous amino acids of the amino acid sequence shown in SEQ ID NO:12. In one embodiment, the 5′ PPFIBP1-3′ ROS1 fusion polypeptide includes a receptor tyrosine kinase domain or a functional fragment thereof. In an embodiment, the 5′PPFIBP1-3′ROS1 fusion polypeptide comprises sufficient ROS1 and sufficient PPFIBP1 sequence such that it has kinase activity, e.g., has elevated activity. In any event, the fusion causes activation in the cells harboring it of oncogenic signaling pathways.

[0080] In another aspect, the invention features a PPFIBP1-ROS1 fusion polypeptide (e.g., a purified PPFIBP1-ROS1 fusion polypeptide), a biologically active or antigenic fragment thereof, as well as reagents (e.g., antibody molecules that bind to a PPFIBP1-ROS1 fusion polypeptide), methods for modulating a PPFIBP1-ROS1 polypeptide activity and detection of a PPFIBP1-ROS1 polypeptide.

[0081] In one embodiment, the PPFIBP1-ROS1 fusion polypeptide has at least one biological activity. In one embodiment, at least one biological activity of the PPFIBP1-ROS1 fusion polypeptide is reduced or inhibited by an anti-cancer drug, e.g., a PPFIBP1 inhibitor, a ROS1 inhibitor. In one embodiment, at least one biological activity of the PPFIBP1-ROS1 fusion polypeptide is reduced or inhibited by a ROS1 inhibitor. In one embodiment, at least one biological activity of the PPFIBP1-ROS1 fusion polypeptide is reduced or inhibited by a PPFIBP1 inhibitor. In one embodiment, at least one biological activity of the PPFIBP1-ROS1 fusion polypeptide is reduced or inhibited by a ROS1 inhibitor, e.g., Ganetespib; Crizotinib; TAE684; a dual ALK and ROS1 inhibitor.

[0082] In yet other embodiments, the PPFIBP1-ROS1 fusion polypeptide is encoded by a nucleic acid molecule described herein. In one embodiment, the PPFIBP1-ROS1 fusion polypeptide is encoded by an in-frame fusion of intron 9 of PPFIBP1 with intron 34 of ROS1 (e.g., a sequence on chromosome 12 and a sequence on chromosome 6). In another embodiment, the PPFIBP1-ROS1 fusion polypeptide includes an amino acid sequence encoded by a nucleotide sequence comprising a fusion junction between the PPFIBP1 transcript and the ROS1 transcript.

[0083] In certain embodiments, the PPFIBP1-ROS1 fusion polypeptide comprises one or more of encoded exons 1-9 from PPFIBP1 and one or more of encoded exons 35-43 of ROS1. In certain embodiments, the PPFIBP1-ROS1 fusion polypeptide comprises at least 1, 2, 3, 4, 5, 6, 7, 8, 9 or more encoded exons of PPFIBP1 and at least at least 1, 2, 3, 4, 5, 6, 7, 8, 9 or more encoded exons of ROS1. In certain embodiments, the PPFIBP1-ROS1 fusion polypeptide comprises a fusion of encoded exon 9 from PPFIBP1 and encoded exon 35 from ROS1 (or a fragment thereof). In other embodiments, the fusion comprises at least 1, 2, 3, 4, 5, 6, 7, 8, 9 or more encoded exons of PPFIBP1; and at least 1, 2, 3, 4, 5, 6, 7, 8, 9 or more encoded exons of ROS1. In certain embodiments, the PPFIBP1-ROS1 fusion polypeptide comprises encoded exons 1-9 from PPFIBP1 and exons 35-43 of ROS1. In certain embodiments, the 5′ PPFIBP1-3′ ROS1 fusion polypeptide comprises a fusion junction of the sequence of exon 9 from PPFIBP1 and the sequence of exon 35 from ROS1.

[0084] In certain embodiments, the PPFIBP1-ROS1 fusion comprises the amino acid sequence corresponding to exon 9 or a fragment thereof from PPFIBP1, and the amino acid sequence corresponding to exon 35 or a fragment thereof from ROS1 (e.g., as shown in SEQ ID NO:20 and SEQ ID NO: 12). In one embodiment, the PPFIBP1-ROS1 fusion comprises at least 5, 10, 15, 20 or more amino acids from exon 9 of PPFIBP1 (e.g., from the amino acid sequence of PPFIBP1 preceding the fusion junction with ROS1, e.g., of the PPFIBP1 sequence shown in SEQ ID NO:20), and at least 5, 10, 15, 20 or more amino acids from exon 35 of ROS1 (e.g., from the amino acid sequence of ROS1 following the fusion junction with PPFIBP1. e.g., of the ROS1 sequence shown in SEQ ID NO:12).

[0085] In one embodiment, the PPFIBP1-ROS1 fusion polypeptide includes a tyrosine kinase domain or a functional fragment thereof. In a related aspect, the invention features PPFIBP1-ROS1 fusion polypeptide or fragments operatively linked to heterologous polypeptides to form fusion proteins.

[0086] In another embodiment, the PPFIBP1-ROS1 fusion polypeptide or fragment is a peptide, e.g., an immunogenic peptide or protein. This peptide or protein contains a fusion junction described herein. Such immunogenic peptides or proteins can be used to raise antibodies specific to the fusion protein. In other embodiments, such immunogenic peptides or proteins can be used for vaccine preparation. The vaccine preparation can include other components, e.g., an adjuvant.

[0087] In another aspect, the invention features antibody molecules that bind to a PPFIBP1-ROS1 fusion polypeptide or fragment described herein. In embodiments, the antibody can distinguish wild type ROS1 (or PPFIBP1) from PPFIBP1-ROS1.

### Detection Reagents and Detection of Mutations

[0088] In another aspect, the invention features a detection reagent, e.g., a purified or an isolated preparation thereof. Detection reagents can distinguish a nucleic acid, or protein sequence, having a breakpoint, e.g., a PPFIBP1-ROS1 breakpoint; from a reference sequence. In one embodiment, the detection reagent detects (e.g., specifically detects) a PPFIBP1-ROS1 fusion nucleic acid or a polypeptide, e.g., distinguishes a wild type ROS1 or another ROS1 fusion (or PPFIBP1) from a PPFIBP1-ROS1 nucleic acid (e.g., as described herein in SEQ ID NO: 19 and SEQ ID NO: 11); or a PPFIBP1-ROS1 polypeptide (e.g., as described herein in SEQ ID NO:20 and SEQ ID NO:12).

[0089] Detection reagents, e.g., nucleic acid-based detection reagents, can be used to identify mutations in a target nucleic acid, e.g., DNA, e.g., genomic DNA or cDNA, or RNA, e.g., in a sample, e.g., a sample of nucleic acid derived from a neoplastic or tumor cell, e.g., a melanocytic neoplasm, melanoma or metastatic cell. Detection reagents, e.g., antibody-based detection reagents, can be used to identify mutations in a target protein, e.g., in a sample, e.g., a sample of protein derived from, or produced by, a neoplastic or tumor cell, e.g., a melanocytic neoplasm, melanoma or metastatic cell.

### Method of Treatment

[0090] In a related aspect, a method of inhibiting, reducing, or treating a hyperproliferative disorder, e.g., a neoplasm (including benign, pre-malignant or malignant (e.g., a cancer), in a subject is provided. The method includes administering to the subject a preselected therapeutic agent, e.g., an anti-cancer agent (e.g., a kinase inhibitor), as a single agent, or in combination, in an amount sufficient to reduce, inhibit or treat the activity or expression of PPFIBP1-ROS1 (e.g., a PPFIBP1-ROS1 fusion described herein), thereby inhibiting, reducing, or treating the hyperproliferative disorder in the subject.

[0091] In one embodiment, the subject treated has a PPFIBP1-ROS1 fusion; e.g., the subject has a tumor or cancer harboring a PPFIBP1-ROS1 fusion. In other embodiments, the subject has been previously identified as having a PPFIBP1-ROS1 fusion. In yet other embodiments, the subject has been previously identified as being likely or unlikely to respond to treatment with a protein kinase inhibitor. e.g., a subject that has previously participated in a clinical trial. In other embodiments, the subject has been previously identified as being likely or unlikely to respond to treatment with a protein kinase inhibitor, based on the presence of the PPFIBP1-ROS1 fusion. In one embodiment, the subject is a mammal, e.g., a human. In one embodiment, the subject has, or at risk of having a cancer particularly melanoma at any stage of disease, for example atypical melanocytic neoplasm. In other embodiments, the subject is a patient, e.g., a cancer patient.

[0092] In certain embodiments, the neoplasm or neoplastic cell is a benign, pre-malignant, malignant (cancer) or metastasis. In certain embodiments, the cancer is a solid tumor, a soft tissue tumor, or a metastatic lesion.

[0093] In one embodiment, the neoplasm or neoplastic cell is a benign, pre-malignant, malignant (cancer) or metastasis. In certain embodiments, the cancer is a solid tumor, a soft tissue tumor, or a metastatic lesion. In one embodiment, the cancer is a carcinoma. In one embodiment, the cancer is an adenocarcinoma. In an embodiment, the cancer is a lung adenocarcinoma. In one embodiment, the cancer is chosen from a lung cancer, a pancreatic cancer, melanoma, a colorectal cancer, an esophageal-gastric cancer, a thyroid cancer, or an adenocarcinoma. In one embodiment, the cancer is a lung adenocarcinoma. In other embodiment, the lung cancer is chosen from one or more of the following: non-small cell lung cancer (NSCLC), small cell lung cancer (SCLC), squamous cell carcinoma (SCC), adenocarcinoma of the lung, bronchogenic carcinoma, or a combination thereof. In one embodiment, the lung cancer is NSCLC or SCC.

[0094] In one embodiment, the anti-cancer agent is a ROS1 inhibitor. In one embodiment, the anti-cancer agent is a PPFIBP1 inhibitor. In one embodiment, the anti-cancer agent is a kinase inhibitor. In one embodiment, the anti-cancer agent is a ROS1 inhibitor, e.g., Ganetespib; Crizotinib; TAE684; AP26113, X-276, X-376, X-396, CH5424802 (AF-802), GSK1838705, ASP3026, PHA-E429, CRL151104; and additional examples of kinase inhibitors are described in de la Bellacasa R. P. et al, Transl Lung Cancer Res 2013; 2(2):72-86.

### TPM3-ROS1 Fusions

[0095] In one embodiment, a fusion includes an in-frame fusion of an exon of tropomyosin 3 (TPM3), e.g., one more exons of TPM3 (e.g., one or more of exons 1-3 of TPM3) or a fragment thereof, and an exon of C-Ros oncogene 1 (ROS1), e.g., one or more exons of a ROS1 (e.g., one or more of exons 36-43 of ROS1) or a fragment thereof. For example, the TPM3-ROS1 fusion can include an in-frame fusion within an intron of TPM3 (e.g., intron 3) or a fragment thereof, with an intron of ROS1 (e.g., intron 35) or a fragment thereof. In one embodiment, the fusion of the TPM3-ROS1 fusion comprises the nucleotide sequence of: chromosome 1 at one or more of a nucleotide (plus or minus 10, 20, 30, 50, 60, 70, 80, 100 or more nucleotides) and chromosome 6 at one or more of a nucleotide (plus or minus 10, 20, 30, 50, 60, 70, 80, 100 or more nucleotides). In one embodiment, the TPM3-ROS1 fusion is a translocation, e.g., a translocation of a portion of chromosome 1 and a portion of chromosome 6.

[0096] In certain embodiments, the TPM3-ROS1 fusion is in a 5′-TPM3 to 3′-ROS1 configuration (also referred to herein as “5′-TPM3-ROS1-3′).” The term “fusion” or “fusion molecule” can refer to a polypeptide or a nucleic acid fusion, depending on the context. It may include a full-length sequence of a fusion or a fragment thereof, e.g., a fusion junction (e.g., a fragment including a portion of TPM3 and a portion of ROS1, e.g., a portion of the TPM3-ROS1 fusion described herein). In one embodiment, the TPM3-ROS1 fusion polypeptide includes a fragment of the amino acid sequence shown in SEQ ID NO: 10 and a fragment of the amino acid sequence shown in SEQ ID NO: 12, or an amino acid sequence substantially identical thereto. In another embodiment, the TPM3-ROS1 fusion nucleic acid includes a fragment of the nucleotide sequence shown in SEQ ID NO:9 and a fragment of the nucleotide sequence shown in SEQ ID NO: 1, or a nucleotide sequence substantially identical thereto. In one embodiment, the TPM3-ROS1 fusion polypeptide comprises sufficient TPM3 and sufficient ROS1 sequence such that the 5′ TPM3-3′ ROS1 fusion has kinase activity, e.g., has elevated activity, e.g., tyrosine kinase activity. The fusion causes activation in the cells harboring it of oncogenic signaling pathways.

[0097] In certain embodiments, the TPM3-ROS1 fusion comprises one or more (or all of) exons 1-3 from TPM3 and one or more (or all of) exons 36-43 of ROS1 (e.g., one or more of the exons shown in SEQ ID NO:9 and SEQ ID NO:11. In another embodiment, the TPM3-ROS1 fusion comprises one or more (or all of) exons 1-3 of TPM3 and one or more (or all of) exons 36-43 of ROS1. In certain embodiments, the TPM3-ROS1 fusion comprises at least 1, 2, 3 or more exons (or encoded exons) from TPM3 and at least 1, 2, 3, 4, 5, 6, 7, 8 or more exons (or encoded exons) from ROS1 (e.g., from the TPM3 and ROS1 sequences shown in SEQ ID NO:9 and SEQ ID NO: 10 and SEQ ID NO: 11 and SEQ ID NO:12.

[0098] In certain embodiments, the TPM3-ROS1 fusion comprises exons 1-3 or a fragment thereof from TPM3, and exons 36-43 or a fragment thereof from ROS1 (e.g., as shown in SEQ ID NO:9 and SEQ ID NO: 11). In one embodiment, the TPM3-ROS1 fusion comprises at least 5, 10, 15, 20, 30, 40, 50 or more amino acids from exons 1-3 of TPM3 (e.g., from the amino acid sequence of TPM3 as shown in SEQ ID NO:10 (e.g., from the amino acid sequence of TPM3 preceding the fusion junction with ROS1, and at least 5, 10, 15, 20, 30, 40, 50 or more amino acids from exons 36-43 of ROS1 (e.g., from the amino acid sequence of ROS1 as shown in SEQ ID NO: 12). In another embodiment, the TPM3-ROS1 fusion comprises at least 6, 12, 15, 20, 25, 50, 75, 100 or more nucleotides from exons 1-3 of TPM3 (e.g., from the nucleotide sequence of TPM3 as shown in SEQ ID NO:9 (e.g., from the nucleotide sequence of TPM3 preceding the fusion junction with ROS1); and at least 6, 12, 15, 20, 25, 50, 75, 100 or more nucleotides from exons 36-43 of ROS1 (e.g., from the nucleotide sequence of ROS1 as shown in SEQ ID NO: 11).

### TPM3-ROS1 Nucleic Acid Molecules

[0099] In one aspect, the invention features a nucleic acid molecule (e.g., an isolated or purified) nucleic acid molecule that includes a fragment of a TPM3 gene and a fragment of a ROS1 gene. In one embodiment, the nucleotide sequence encodes a TPM3-ROS1 fusion polypeptide that includes a tyrosine kinase domain or a functional fragment thereof. In another embodiment, the nucleotide sequence encodes a fragment of the ROS1 polypeptide including the amino acid sequence of SEQ ID NO: 12 or a fragment thereof, or a sequence substantially identical thereto. In other embodiments, the nucleic acid molecule includes a fragment of the TPM3 gene encoding the amino acid sequence of SEQ ID NO: 10 or a fragment thereof, or a sequence substantially identical thereto. In yet other embodiments, the nucleic acid molecule includes a nucleotide sequence encoding the amino acid sequence shown in SEQ ID NO: 10, or a fragment thereof, and the amino acid sequence shown in SEQ ID NO: 12 or a fragment thereof, or a sequence substantially identical thereto.

[0100] In one embodiment, the nucleic acid molecule includes a fusion, e.g., an in-frame fusion, between an intron of TPM3 (e.g., intron 3, or a fragment thereof), and an intron of ROS1 (e.g., intron 35, or a fragment thereof). The TPM3-ROS1 fusion can comprise a fusion of the nucleotide sequence of: chromosome 1 at one or more of a nucleotide (plus or minus 10, 20, 30, 50, 60, 70, 80, 100 nucleotides) and chromosome 6 at one or more of a nucleotide (plus or minus 10, 20, 30, 50, 60, 70, 80, 100 nucleotides), or a fragment thereof. In one embodiment, the TPM3-ROS1 fusion comprises a fusion of the nucleotide sequence of: chromosome 1 at one or more of a nucleotide (plus or minus 10, 20, 30, 50, 60, 70, 80, 100 nucleotides) and chromosome 6 at one or more of a nucleotide (plus or minus 10, 20, 30, 50, 60, 70, 80, 100 nucleotides), or a fragment thereof.

[0101] In another embodiment, the TPM3-ROS1 fusion comprises a nucleotide sequence (e.g., a fragment of a nucleotide sequence) shown in SEQ ID NO:9 and a nucleotide sequence (e.g., a fragment of a nucleotide sequence) shown in SEQ ID NO:11, or a fragment of the fusion. In one embodiment, the TPM3-ROS1 fusion comprises a nucleotide sequence substantially identical to the nucleotide sequence (e.g., a fragment of a nucleotide sequence) shown in SEQ ID NO:9 and the nucleotide sequence (e.g., a fragment of a nucleotide sequence) shown SEQ ID NO: 11, or a fragment of the fusion. In one embodiment, the TPM3-ROS1 fusion comprises a nucleotide sequence at least 70%, at least 75%, at least 80%, at least 85%, at least 90%, at least 95%, at least 99%, at least 99.5 or greater, identical to the nucleotide sequence (e.g., a fragment of a nucleotide sequence) shown in SEQ ID NO:9 and to the nucleotide sequence (e.g., a fragment of a nucleotide sequence) shown in SEQ ID NO: 11. In one embodiment, the TPM3-ROS1 fusion comprises a nucleotide sequence containing at least 25, 50, 100, 150, 200, 500, 1000, 1500, 2000, 2500, 3000, or more nucleotides of the nucleotide sequence shown in SEQ ID NO:9 and a nucleotide sequence containing at least 25, 50, 100, 150, 200, 500, 1000, 1500, 2000, 2500, 3000, or more nucleotides of the nucleotide sequence shown in SEQ ID NO: 11. In one embodiment, the TPM3-ROS1 fusion comprises a nucleotide sequence containing at least 25, 50, 100, 150, 200, 500, 1000, 1500, 2000, 2500, 3000, or more contiguous nucleotides of the nucleotide sequence shown in SEQ ID NO:9 and a nucleotide sequence containing at least 25, 50, 100, 150, 200, 500, 1000, 1500, 2000, 2500, 3000, or more nucleotides of the nucleotide sequence shown in SEQ ID NO: 11.

[0102] In another embodiment, the nucleic acid molecule includes a fusion, e.g., an in-frame fusion, of at least 1, 2, 3 or more exons of TPM3 or a fragment thereof (e.g., one or more of exons 1-3 of TPM3 or a fragment thereof), and at least 1, 2, 3, 4, 5, 6, 7, 8 or more exons of ROS1 or a fragment thereof (e.g., one or more of exons 36-43 of ROS1 or a fragment thereof). In yet other embodiments, the nucleic acid molecule includes a fragment the nucleotide sequence shown in SEQ ID NO:9 and a fragment of the nucleotide sequence shown in SEQ ID NO:11 or a fragment of the fusion, or a sequence substantially identical thereto.

[0103] In one embodiment, the nucleic acid molecule is complementary to at least a portion of a nucleotide sequence disclosed herein, e.g., is capable of hybridizing under a stringency condition described herein to SEQ ID NO:9 and/or SEQ ID NO: 11, or a fragment thereof. In yet another embodiment, the nucleic acid molecule hybridizes to a nucleotide sequence that is complementary to at least a portion of a nucleotide sequence disclosed herein, e.g., is capable of hybridizing under a stringency condition to a nucleotide sequence complementary to SEQ ID NO:9 and/or SEQ ID NO: 11, or a fragment thereof. The nucleotide sequence of a cDNA encoding an exemplary 5′ TPM3-3′ ROS1 fusion is shown in at least exon 20 (e.g., exons 1-3) of SEQ ID NO:9 and at least exon 36 (e.g., exons 36-43) of SEQ ID NO: 11, and the predicted amino acid sequence is shown in the corresponding encoded exons of SEQ ID NO: 10 and the corresponding encoded exons of SEQ ID NO: 12, respectively.

[0104] In an embodiment the TPM3-ROS1 nucleic acid molecule comprises sufficient TPM3 and sufficient ROS1 sequence such that the encoded 5′ TPM3-3′ ROS1 fusion has kinase activity, e.g., has elevated activity. In certain embodiments, the 5′ TPM3-3′ ROS1 fusion comprises exons 1-3 from TPM3 and exons 36-43 from ROS1. In certain embodiments, the TPM3-ROS1 fusion comprises at least 1, 2, 3 or more exons from TPM3 and at least at least 1, 2, 3, 4, 5, 6, 7, 8 or more exons of ROS1. In certain embodiments, the TPM3-ROS1 fusion comprises a fusion of exon 20 from TPM3 and exon 36 from ROS1. In another embodiment, the TPM3-ROS1 fusion comprises 1, 2, 3 or more exons of TPM3; and at least 1, 2, 3, 4, 5, 6, 7, 8 or more exons of ROS1.

[0105] In one embodiment, the nucleic acid molecule includes a nucleotide sequence that has an in-frame fusion of intron 3 of TPM3 (e.g., NM_{—}152263) with intron 35 of ROS1 (e.g., NM_{—}002944). In another embodiment, the nucleic acid molecule includes a nucleotide sequence that includes a breakpoint. For example, the nucleic acid molecule includes a nucleotide sequence that includes the fusion junction between the TPM3 gene and the ROS1 gene, e.g., the breakpoint between intron 3 of TPM3 and intron 35 of ROS1. In other embodiments, the nucleic acid molecules includes a nucleotide sequence of one or more of nucleotide of chromosome 1 coupled to (e.g., directly or indirectly juxtaposed to) one or more of nucleotide of chromosome 6. In one embodiment, the nucleic acid molecule includes the nucleotide sequence of: chromosome 1 at one or more of a nucleotide plus or minus 10, 20, 30, 40 50, 60, 80, 100, 150 nucleotides and chromosome 6 at one or more of a nucleotide plus or minus 10, 20, 30, 40 50, 60, 80, 100, 150 nucleotides (corresponding to the breakpoint of a TPM3-ROS1 fusion), or a fragment thereof, or a sequence substantially identical thereto. In one embodiment, the nucleic acid molecule is complementary to at least a portion of a nucleotide sequence disclosed herein, e.g., is capable of hybridizing under a stringency condition described herein to SEQ ID NO:9 and/or SEQ ID NO:11 or a fragment thereof. In yet other embodiment, the nucleic acid molecule hybridizes to a nucleotide sequence that is complementary to at least a portion of a nucleotide sequence disclosed herein, e.g., is capable of hybridizing under a stringency condition described herein to a nucleotide sequence complementary to SEQ ID NO:9 or SEQ ID NO: 11 or a fragment thereof.

[0106] In another embodiment, the TPM3-ROS1 fusion nucleic acid comprises at least 6, 12, 15, 20, 25, 50, 75, 100 or more nucleotides from exon 20 of TPM3 (e.g., from the nucleotide sequence of TPM3 preceding the fusion junction with ROS1, e.g., of the TPM3 sequence shown in SEQ ID NO:9), and at least 6, 12, 15, 20, 25, 50, 75, 100 or more nucleotides from exon 36 of ROS1 (e.g., from the nucleotide sequence of ROS1 following the fusion junction with TPM3, e.g., of the ROS1 sequence shown in SEQ ID NO: 1).

[0107] In other embodiments, the nucleic acid molecule includes a nucleotide sequence encoding a TPM3-ROS1 fusion polypeptide that includes a fragment of a TPM3 gene and a fragment of a ROS1 gene. In one embodiment, the nucleotide sequence encodes a TPM3-ROS1 fusion polypeptide that includes e.g., a tyrosine kinase domain or a functional fragment thereof. In yet other embodiments, the nucleic acid molecule includes a nucleotide sequence encoding the amino acid sequence (e.g., a fragment of the amino acid sequence) shown in SEQ ID NO: 10 and a nucleotide sequence encoding the amino acid sequence (e.g., a fragment of the amino acid sequence) shown in SEQ ID NO:12, or a fragment of the fusion, or a sequence substantially identical thereto. In one embodiment, the encoded TPM3-ROS1 fusion polypeptide includes a tyrosine kinase domain or a functional fragment thereof.

[0108] In one embodiment, the TPM3-ROS1 fusion includes the full sequence or a fragment of the nucleotide sequence shown in SEQ ID NO:21 and SEQ ID NO:94, or a nucleotide sequence substantially identical thereto. In another embodiment, the TPM3-ROS1 fusion polypeptide includes the full sequence or a fragment of the amino acid sequence shown in SEQ ID NO:22 and SEQ ID NO:95, or an amino acid sequence substantially identical thereto, for example at least 70% identical or 80% identical or 90% identical or even more. In a related aspect, the invention features nucleic acid constructs that include the TPM3-ROS1 nucleic acid molecules described herein. In certain embodiments, the nucleic acid molecules are operatively linked to a native or a heterologous regulatory sequence. Also included are vectors and host cells that include the TPM3-ROS1 nucleic acid molecules described herein, e.g., vectors and host cells suitable for producing the nucleic acid molecules and polypeptides described herein.

[0109] In a related aspect, methods of producing the nucleic acid molecules and polypeptides described herein are also described.

[0110] In another aspect, the invention features nucleic acid molecules that reduce or inhibit the expression of a nucleic acid molecule that encodes a TPM3-ROS1 fusion described herein. Examples of such nucleic acid molecules include, for example, antisense molecules, ribozymes, RNAi, triple helix molecules that hybridize to a nucleic acid encoding TPM3-ROS1, or a transcription regulatory region of TPM3-ROS1, and blocks or reduces mRNA expression of TPM3-ROS1.

### Nucleic Acid Detection and Capturing Reagents

[0111] The invention also features a nucleic acid molecule, e.g., nucleic acid fragment, suitable as probe, primer, bait or library member that includes, flanks, hybridizes to, which are useful for identifying, or are otherwise based on, the TPM3-ROS1 fusions described herein. In certain embodiments, the probe, primer or bait molecule is an oligonucleotide that allows capture, detection or isolation of a TPM3-ROS1 fusion nucleic acid molecule described herein. The oligonucleotide can comprise a nucleotide sequence substantially complementary to a fragment of the TPM3-ROS1 fusion nucleic acid molecules described herein. The sequence identity between the nucleic acid fragment, e.g., the oligonucleotide, and the target TPM3-ROS1 sequence need not be exact, so long as the sequences are sufficiently complementary to allow the capture, detection or isolation of the target sequence. In one embodiment, the nucleic acid fragment is a probe or primer that includes an oligonucleotide between about 5 and 25, e.g., between 10 and 20, or 10 and 15 nucleotides in length. In other embodiments, the nucleic acid fragment is a bait that includes an oligonucleotide between about 100 to 300 nucleotides, 130 and 230 nucleotides, or 150 and 200 nucleotides, in length.

[0112] In one embodiment, the nucleic acid fragment can be used to identify or capture, e.g., by hybridization, a TPM3-ROS1 fusion. For example, the nucleic acid fragment can be a probe, a primer, or a bait, for use in identifying or capturing, e.g., by hybridization, a TPM3-ROS1 fusion described herein. In one embodiment, the nucleic acid fragment can be useful for identifying or capturing a TPM3-ROS1 breakpoint. e.g., the nucleotide sequence of: chromosome 1 at nucleotide plus or minus 10, 20, 30, 40, 50, 60, 80, 100, 150 nucleotides and chromosome 6 at nucleotide plus or minus 10, 20, 30, 40 50, 60, 80, 100, 150 nucleotides.

[0113] In one embodiment, the nucleic acid fragment hybridizes to a nucleotide sequence within a chromosomal rearrangement that creates an in-frame fusion of intron 3 of TPM3 with intron 35 of ROS1. In one embodiment, the nucleic acid fragment hybridizes to a nucleotide sequence in the region In other embodiments, the nucleic acid molecules includes a nucleotide sequence in the region of a nucleotide sequence of chromosome 1 coupled to (e.g., juxtaposed to) nucleotides in the region of a nucleotide sequence of chromosome 6. In one embodiment, the nucleic acid fragment hybridizes to a nucleotide sequence that includes a breakpoint, e.g., the nucleotide sequence of: chromosome 1 at nucleotide plus or minus 10, 20, 30, 40, 50, 60, 80, 100, 150 or more nucleotides and chromosome 6 at nucleotide plus or minus 10, 20, 30, 40, 50, 60, 80, 100, 150 or more nucleotides. For example, the nucleic acid fragment can hybridize to a nucleotide sequence that includes the fusion junction between the TPM3 gene and the ROS1 gene, e.g., a nucleotide sequence that includes a portion of a nucleotide sequence within intron 3 of a TPM3 gene and intron 35 of a ROS1 gene.

[0114] In another embodiment, the nucleic acid fragment hybridizes to a nucleotide sequence that comprises at least 6, 12, 15, 20, 25, 50, 75, 100, 150 or more nucleotides from exon 20 of TPM3 (e.g., from the nucleotide sequence of TPM3 preceding the fusion junction with ROS1, e.g., of the TPM3 sequence shown in SEQ ID NO:9), and at least 6, 12, 15, 20, 25, 50, 75, 100, 150 or more nucleotides from exon 36 of ROS1 (e.g., from the nucleotide sequence of ROS1 following the fusion junction with TPM3, e.g., of the ROS1 sequence shown in SEQ ID NO: 11).

[0115] The probes or primers described herein can be used, for example, for FISH detection or PCR amplification. In one exemplary embodiment where detection is based on PCR, amplification of the TPM3-ROS1 fusion junction fusion junction can be performed using a primer or a primer pair, e.g., for amplifying a sequence flanking the fusion junctions described herein, e.g., the mutations or the junction of a chromosomal rearrangement described herein, e.g. TPM3-ROS1.

[0116] In one embodiment, a pair of isolated oligonucleotide primers can amplify a region containing or adjacent to a position in the TPM3-ROS1 fusion. For example, forward primers can be designed to hybridize to a nucleotide sequence within TPM3 genomic or mRNA sequence (e.g., a nucleotide sequence within exon 20 of TPM3 of SEQ ID NO:9), and the reverse primers can be designed to hybridize to a nucleotide sequence of ROS1 (e.g., a nucleotide sequence within exon 36 of ROS1, of SEQ ID NO: 11).

[0117] In another embodiment, the nucleic acid fragments can be used to identify, e.g., by hybridization, a TPM3-ROS1 fusion. In one embodiment, the nucleic acid fragment hybridizes to a nucleotide sequence that includes a fusion junction between the TPM3 transcript and the ROS1 transcript.

[0118] In other embodiments, the nucleic acid fragment includes a bait that comprises a nucleotide sequence that hybridizes to a TPM3-ROS1 fusion nucleic acid molecule described herein, and thereby allows the capture or isolation said nucleic acid molecule. In one embodiment, a bait is suitable for solution phase hybridization. In other embodiments, a bait includes a binding entity, e.g., an affinity tag, that allows capture and separation, e.g., by binding to a binding entity, of a hybrid formed by a bait and a nucleic acid hybridized to the bait.

[0119] In other embodiments, the nucleic acid fragment includes a library member comprising a TPM3-ROS1 nucleic acid molecule described herein. In one embodiment, the library member includes a rearrangement that results in a TPM3-ROS1 fusion described herein.

[0120] The nucleic acid fragment can be detectably labeled with, e.g., a radiolabel, a fluorescent label, a bioluminescent label, a chemiluminescent label, an enzyme label, a binding pair label, or can include an affinity tag; a tag, or identifier (e.g., an adaptor, barcode or other sequence identifier).

### TPM3-ROS1 Fusion Polypeptides

[0121] In another embodiment, the TPM3-ROS1 fusion comprises an amino acid sequence (e.g., a fragment of the amino acid sequence) shown in SEQ ID NO: 10 and an amino acid sequence (e.g., a fragment of the amino acid sequence) shown in SEQ ID NO: 12, or a fragment of the fusion. In one embodiment, the TPM3-ROS1 fusion comprises an amino acid sequence substantially identical to the amino acid sequence (e.g., a fragment of the amino acid sequence) shown in SEQ ID NO: 10 and the amino acid sequence (e.g., a fragment of the amino acid sequence) shown in SEQ ID NO:12, or a fragment thereof. In one embodiment, the TPM3-ROS1 fusion comprises an amino acid sequence at least 70%, at least 75%, at least 80%, at least 85%, at least 90%, at least 95%, at least 99%, at least 99.5 or greater, identical to the amino acid sequence (e.g., a fragment of the amino acid sequence) shown in SEQ ID NO: 10 and the amino acid sequence (e.g., a fragment of the amino acid sequence) shown in SEQ ID NO:12. In one embodiment, the TPM3-ROS1 fusion comprises a sequence containing at least 10, 20, 50, 100, 500, 600, 700, 800, 900, 1000, or more amino acids of the amino acid sequence shown in SEQ ID NO:10 and SEQ ID NO:12. In one embodiment, the TPM3-ROS1 fusion comprises an amino acid sequence containing at least 5, 10, 20, 50, 100, 500, 600, 700, 800, 900, 1000, or more contiguous amino acids of the amino acid sequence shown in SEQ ID NO:10 and at least 5, 10, 20, 50, 100, 500, 600, 700, 800, 900, 1000, or more contiguous amino acids of the amino acid sequence shown in SEQ ID NO:12. In one embodiment, the 5′ TPM3-3′ ROS1 fusion polypeptide includes a receptor tyrosine kinase domain or a functional fragment thereof. In an embodiment, the 5′TPM3-3′ROS1 fusion polypeptide comprises sufficient ROS1 and sufficient TPM3 sequence such that it has kinase activity, e.g., has elevated activity.

[0122] In another aspect, the invention features a TPM3-ROS1 fusion polypeptide (e.g., a purified TPM3-ROS1 fusion polypeptide), a biologically active or antigenic fragment thereof, as well as reagents (e.g., antibody molecules that bind to a TPM3-ROS1 fusion polypeptide), methods for modulating a TPM3-ROS1 polypeptide activity and detection of a TPM3-ROS1 polypeptide.

[0123] In one embodiment, the TPM3-ROS1 fusion polypeptide has at least one biological activity. In one embodiment, at least one biological activity of the TPM3-ROS1 fusion polypeptide is reduced or inhibited by an anti-cancer drug, e.g., a TPM3 inhibitor, a ROS1 inhibitor. In one embodiment, at least one biological activity of the TPM3-ROS1 fusion polypeptide is reduced or inhibited by a ROS1 inhibitor. In one embodiment, at least one biological activity of the TPM3-ROS1 fusion polypeptide is reduced or inhibited by a TPM3 inhibitor. In one embodiment, at least one biological activity of the TPM3-ROS1 fusion polypeptide is reduced or inhibited by a ROS1 inhibitor, e.g., Ganetespib; Crizotinib; TAE684; a dual ALK and ROS1 inhibitor.

[0124] In yet other embodiments, the TPM3-ROS1 fusion polypeptide is encoded by a nucleic acid molecule described herein. In one embodiment, the TPM3-ROS1 fusion polypeptide is encoded by an in-frame fusion of intron 3 of TPM3 with intron 35 of ROS1 (e.g., a sequence on chromosome 1 and a sequence on chromosome 6). In another embodiment, the TPM3-ROS1 fusion polypeptide includes an amino acid sequence encoded by a nucleotide sequence comprising a fusion junction between the TPM3 transcript and the ROS1 transcript.

[0125] In certain embodiments, the TPM3-ROS1 fusion polypeptide comprises one or more of encoded exons 1-3 from TPM3 and one or more of encoded exons 36-43 of ROS1. In certain embodiments, the TPM3-ROS1 fusion polypeptide comprises at least 1, 2, 3 or more encoded exons of TPM3 and at least at least 1, 2, 3, 4, 5, 6, 7, 8 or more encoded exons of ROS1. In certain embodiments, the TPM3-ROS1 fusion polypeptide comprises a fusion of encoded exon 20 from TPM3 and encoded exon 36 from ROS1 (or a fragment thereof). In other embodiments, the fusion comprises at least 1, 2, 3 or more encoded exons of TPM3; and at least 1, 2, 3, 4, 5, 6, 7, 8 or more encoded exons of ROS1. In certain embodiments, the TPM3-ROS1 fusion polypeptide comprises encoded exons 1-3 from TPM3 and exons 36-43 of ROS1. In certain embodiments, the 5′ TPM3-3′ ROS1 fusion polypeptide comprises a fusion junction of the sequence of exon 20 from TPM3 and the sequence of exon 36 from ROS1.

[0126] In certain embodiments, the TPM3-ROS1 fusion comprises the amino acid sequence corresponding to exon 20 or a fragment thereof from TPM3, and the amino acid sequence corresponding to exon 36 or a fragment thereof from ROS1 (e.g., as shown in SEQ ID NO:10 and SEQ ID NO:12). In one embodiment, the TPM3-ROS1 fusion comprises at least 5, 10, 15, 20 or more amino acids from exon 20 of TPM3 (e.g., from the amino acid sequence of TPM3 preceding the fusion junction with ROS1, e.g., of the TPM3 sequence shown in SEQ ID NO:10), and at least 5, 10, 15, 20 or more amino acids from exon 36 of ROS1 (e.g., from the amino acid sequence of ROS1 following the fusion junction with TPM3, e.g., of the ROS1 sequence shown in SEQ ID NO: 12).

[0127] In one embodiment, the TPM3-ROS1 fusion polypeptide includes a tyrosine kinase domain or a functional fragment thereof. In a related aspect, the invention features TPM3-ROS1 fusion polypeptide or fragments operatively linked to heterologous polypeptides to form fusion proteins. In particular embodiments the fusion protein has a constitutively active kinase domain, or in any event a more active kinase than a normal cell containing only the intact wild-type genes and not the TPM3-ROS1 fusion.

[0128] In another embodiment, the TPM3-ROS1 fusion polypeptide or fragment is a peptide, e.g., an immunogenic peptide or protein. This peptide or protein contains a fusion junction described herein. Such immunogenic peptides or proteins can be used to raise antibodies specific to the fusion protein. In other embodiments, such immunogenic peptides or proteins can be used for vaccine preparation. The vaccine preparation can include other components, e.g., an adjuvant.

[0129] In another aspect, the invention features antibody molecules that bind to a TPM3-ROS1 fusion polypeptide or fragment described herein. In embodiments, the antibody can distinguish wild type ROS1 (or TPM3) from TPM3-ROS1.

### Detection Reagents and Detection of Mutations

[0130] In another aspect, the invention features a detection reagent, e.g., a purified or an isolated preparation thereof. Detection reagents can distinguish a nucleic acid, or protein sequence, having a breakpoint, e.g., a TPM3-ROS1 breakpoint; from a reference sequence. In one embodiment, the detection reagent detects (e.g., specifically detects) a TPM3-ROS1 fusion nucleic acid or a polypeptide, e.g., distinguishes a wild type ROS1 or another ROS1 fusion (or TPM3) from a TPM3-ROS1 nucleic acid (e.g., as described herein in SEQ ID NO:9 and SEQ ID NO:11); or a TPM3-ROS1 polypeptide (e.g., as described herein in SEQ ID NO: 10 and SEQ ID NO: 12).

[0131] Detection reagents, e.g., nucleic acid-based detection reagents, can be used to identify mutations in a target nucleic acid, e.g., DNA, e.g., genomic DNA or cDNA, or RNA. e.g., in a sample, e.g., a sample of nucleic acid derived from a neoplastic or tumor cell, e.g., a melanocytic neoplasm, melanoma or metastatic cell. Detection reagents, e.g., antibody-based detection reagents, can be used to identify mutations in a target protein, e.g., in a sample, e.g., a sample of protein derived from, or produced by, a neoplastic or tumor cell, e.g., a melanocytic neoplasm, melanoma or metastatic cell.

### Method of Treatment

[0132] In a related aspect, a method of inhibiting, reducing, or treating a hyperproliferative disorder, e.g., a neoplasm (including benign, pre-malignant or malignant (e.g., a cancer), in a subject is provided. The method includes administering to the subject a preselected therapeutic agent, e.g., an anti-cancer agent (e.g., a kinase inhibitor), as a single agent, or in combination, in an amount sufficient to reduce, inhibit or treat the activity or expression of TPM3-ROS1 (e.g., a TPM3-ROS1 fusion described herein), thereby inhibiting, reducing, or treating the hyperproliferative disorder in the subject.

[0133] In one embodiment, the subject treated has a TPM3-ROS1 fusion; e.g., the subject has a tumor or cancer harboring a TPM3-ROS1 fusion. In other embodiments, the subject has been previously identified as having a TPM3-ROS1 fusion. In yet other embodiments, the subject has been previously identified as being likely or unlikely to respond to treatment with a protein kinase inhibitor, e.g., a subject that has previously participated in a clinical trial. In other embodiments, the subject has been previously identified as being likely or unlikely to respond to treatment with a protein kinase inhibitor, based on the presence of the TPM3-ROS1 fusion. In one embodiment, the subject is a mammal, e.g., a human. In one embodiment, the subject has, or at risk of having a cancer at any stage of disease. In other embodiments, the subject is a patient, e.g., a cancer patient.

[0134] In certain embodiments, the neoplasm or neoplastic cell is a benign, pre-malignant, malignant (cancer) or metastasis. In certain embodiments, the cancer is a solid tumor, a soft tissue tumor, or a metastatic lesion.

[0135] In one embodiment, the neoplasm or neoplastic cell is a benign, pre-malignant, malignant (cancer) or metastasis. In certain embodiments, the cancer is a solid tumor, a soft tissue tumor, or a metastatic lesion. In one embodiment, the cancer is a carcinoma. In one embodiment, the cancer is an adenocarcinoma. In an embodiment, the cancer is a lung adenocarcinoma. In one embodiment, the cancer is chosen from a lung cancer, a pancreatic cancer, melanoma, a colorectal cancer, an esophageal-gastric cancer, a thyroid cancer, or an adenocarcinoma. In one embodiment, the cancer is a lung adenocarcinoma. In other embodiment, the lung cancer is chosen from one or more of the following: non-small cell lung cancer (NSCLC), small cell lung cancer (SCLC), squamous cell carcinoma (SCC), adenocarcinoma of the lung, bronchogenic carcinoma, or a combination thereof. In one embodiment, the lung cancer is NSCLC or SCC.

[0136] In one embodiment, the anti-cancer agent is a ROS1 inhibitor. In one embodiment, the anti-cancer agent is a TPM3 inhibitor. In one embodiment, the anti-cancer agent is a kinase inhibitor. In one embodiment, the anti-cancer agent is a ROS1 inhibitor, e.g., Ganetespib; Crizotinib; TAE684; AP26113, X-276, X-376, X-396, CH5424802 (AF-802), GSK1838705, ASP3026, PHA-E429, CRL151104; and additional examples of kinase inhibitors are described in de la Bellacasa R. P. et al, Transl Lung Cancer Res 2013; 2(2):72-86.

### ZCCHC8-ROS1 Fusions

[0137] In one embodiment, a fusion includes an in-frame fusion of an exon of zinc finger CCHC domain containing 8 protein (ZCCHC8), e.g., one more exons of ZCCHC8 (e.g., one or more of exons 1-2 of ZCCHC8) or a fragment thereof, and an exon of C-Ros oncogene 1 (ROS1), e.g., one or more exons of a ROS1 (e.g., one or more of exons 36-43 of ROS1) or a fragment thereof. For example, the ZCCHC8-ROS1 fusion can include an in-frame fusion within an intron of ZCCHC8 (e.g., intron 1) or a fragment thereof, with an intron of ROS1 (e.g., intron 35) or a fragment thereof. In one embodiment, the fusion of the ZCCHC8-ROS1 fusion comprises the nucleotide sequence of: chromosome 12 at one or more of a nucleotide (plus or minus 10, 20, 30, 50, 60, 70, 80, 100 or more nucleotides) and chromosome 6 at one or more of a nucleotide (plus or minus 10, 20, 30, 50, 60, 70, 80, 100 or more nucleotides). In one embodiment, the ZCCHC8-ROS1 fusion is a translocation, e.g., a translocation of a portion of chromosome 12 and a portion of chromosome 6.

[0138] In certain embodiments, the ZCCHC8-ROS1 fusion is in a 5′-ZCCHC8 to 3′-ROS1 configuration (also referred to herein as “5′-ZCCHC8-ROS1-3′).” The term “fusion” or “fusion molecule” can refer to a polypeptide or a nucleic acid fusion, depending on the context. It may include a full-length sequence of a fusion or a fragment thereof, e.g., a fusion junction (e.g., a fragment including a portion of ZCCHC8 and a portion of ROS1, e.g., a portion of the ZCCHC8-ROS1 fusion described herein). In one embodiment, the ZCCHC8-ROS1 fusion polypeptide includes a fragment of the amino acid sequence shown in SEQ ID NO:26 and a fragment of the amino acid sequence shown in SEQ ID NO: 12, or an amino acid sequence substantially identical thereto. In another embodiment, the ZCCHC8-ROS1 fusion nucleic acid includes a fragment of the nucleotide sequence shown in SEQ ID NO:25 and a fragment of the nucleotide sequence shown in SEQ ID NO: 11, or a nucleotide sequence substantially identical thereto. In one embodiment, the ZCCHC8-ROS1 fusion polypeptide comprises sufficient ZCCHC8 and sufficient ROS1 sequence such that the 5′ ZCCHC8-3′ ROS1 fusion has kinase activity, e.g., has elevated activity, e.g., tyrosine kinase activity the fusion causes activation in the cells harboring it of oncogenic signaling pathways.

[0139] In certain embodiments, the ZCCHC8-ROS1 fusion comprises one or more (or all of) exons 1-2 from ZCCHC8 and one or more (or all of) exons 36-43 of ROS1 (e.g., one or more of the exons shown in SEQ ID NO:25 and SEQ ID NO: 11. In another embodiment, the ZCCHC8-ROS1 fusion comprises one or more (or all of) exons 1-2 of ZCCHC8 and one or more (or all of) exons 36-43 of ROS1. In certain embodiments, the ZCCHC8-ROS1 fusion comprises at least 1, 2 or more exons (or encoded exons) from ZCCHC8 and at least 1, 2, 3, 4, 5, 6, 7, 8 or more exons (or encoded exons) from ROS1 (e.g., from the ZCCHC8 and ROS1 sequences shown in SEQ ID NO:25 and SEQ ID NO:26 and SEQ ID NO: 11 and SEQ ID NO: 12.

[0140] In certain embodiments, the ZCCHC8-ROS1 fusion comprises exons 1-2 or a fragment thereof from ZCCHC8, and exons 36-43 or a fragment thereof from ROS1 (e.g., as shown in SEQ ID NO:25 and SEQ ID NO: 11). In one embodiment, the ZCCHC8-ROS1 fusion comprises at least 5, 10, 15, 20, 30, 40, 50 or more amino acids from exons 1-2 of ZCCHC8 (e.g., from the amino acid sequence of ZCCHC8 as shown in SEQ ID NO:26 (e.g., from the amino acid sequence of ZCCHC8 preceding the fusion junction with ROS1, and at least 5, 10, 15, 20, 30, 40, 50 or more amino acids from exons 36-43 of ROS1 (e.g., from the amino acid sequence of ROS1 as shown in SEQ ID NO: 12). In another embodiment, the ZCCHC8-ROS1 fusion comprises at least 6, 12, 15, 20, 25, 50, 75, 100 or more nucleotides from exons 1-2 of ZCCHC8 (e.g., from the nucleotide sequence of ZCCHC8 as shown in SEQ ID NO:25 (e.g., from the nucleotide sequence of ZCCHC8 preceding the fusion junction with ROS1); and at least 6, 12, 15, 20, 25, 50, 75, 100 or more nucleotides from exons 36-43 of ROS1 (e.g., from the nucleotide sequence of ROS1 as shown in SEQ ID NO: 11).

### ZCCHC8-ROS1 Nucleic Acid Molecules

[0141] In one aspect, the invention features a nucleic acid molecule (e.g., an isolated or purified) nucleic acid molecule that includes a fragment of a ZCCHC8 gene and a fragment of a ROS1 gene. In one embodiment, the nucleotide sequence encodes a ZCCHC8-ROS1 fusion polypeptide that includes a tyrosine kinase domain or a functional fragment thereof. In another embodiment, the nucleotide sequence encodes a fragment of the ROS1 polypeptide including the amino acid sequence of SEQ ID NO: 12 or a fragment thereof, or a sequence substantially identical thereto. In other embodiments, the nucleic acid molecule includes a fragment of the ZCCHC8 gene encoding the amino acid sequence of SEQ ID NO:26 or a fragment thereof, or a sequence substantially identical thereto. In yet other embodiments, the nucleic acid molecule includes a nucleotide sequence encoding the amino acid sequence shown in SEQ ID NO:26, or a fragment thereof, and the amino acid sequence shown in SEQ ID NO: 12 or a fragment thereof, or a sequence substantially identical thereto.

[0142] In one embodiment, the nucleic acid molecule includes a fusion. e.g., an in-frame fusion, between an intron of ZCCHC8 (e.g., intron 1, or a fragment thereof), and an intron of ROS1 (e.g., intron 35, or a fragment thereof). The ZCCHC8-ROS1 fusion can comprise a fusion of the nucleotide sequence of: chromosome 12 at one or more of a nucleotide (plus or minus 10, 20, 30, 50, 60, 70, 80, 100 nucleotides) and chromosome 6 at one or more of a nucleotide (plus or minus 10, 20, 30, 50, 60, 70, 80, 100 nucleotides), or a fragment thereof. In one embodiment, the ZCCHC8-ROS1 fusion comprises a fusion of the nucleotide sequence of: chromosome 12 at one or more of a nucleotide (plus or minus 10, 20, 30, 50, 60, 70, 80, 100 nucleotides) and chromosome 6 at one or more of a nucleotide (plus or minus 10, 20, 30, 50, 60, 70, 80, 100 nucleotides), or a fragment thereof.

[0143] In another embodiment, the ZCCHC8-ROS1 fusion comprises a nucleotide sequence (e.g., a fragment of a nucleotide sequence) shown in SEQ ID NO:25 and a nucleotide sequence (e.g., a fragment of a nucleotide sequence) shown in SEQ ID NO: 11, or a fragment of the fusion. In one embodiment, the ZCCHC8-ROS1 fusion comprises a nucleotide sequence substantially identical to the nucleotide sequence (e.g., a fragment of a nucleotide sequence) shown in SEQ ID NO:25 and the nucleotide sequence (e.g., a fragment of a nucleotide sequence) shown SEQ ID NO:11, or a fragment of the fusion. In one embodiment, the ZCCHC8-ROS1 fusion comprises a nucleotide sequence at least 70%, at least 75%, at least 80%, at least 85%, at least 90%, at least 95%, at least 99%, at least 99.5 or greater, identical to the nucleotide sequence (e.g., a fragment of a nucleotide sequence) shown in SEQ ID NO:25 and to the nucleotide sequence (e.g., a fragment of a nucleotide sequence) shown in SEQ ID NO:11. In one embodiment, the ZCCHC8-ROS1 fusion comprises a nucleotide sequence containing at least 25, 50, 100, 150, 200, 500, 1000, 1500, 2000, 2500, 3000, or more nucleotides of the nucleotide sequence shown in SEQ ID NO:25 and a nucleotide sequence containing at least 25, 50, 100, 150, 200, 500, 1000, 1500, 2000, 2500, 3000, or more nucleotides of the nucleotide sequence shown in SEQ ID NO: 11. In one embodiment, the ZCCHC8-ROS1 fusion comprises a nucleotide sequence containing at least 25, 50, 100, 150, 200, 500, 1000, 1500, 2000, 2500, 3000, or more contiguous nucleotides of the nucleotide sequence shown in SEQ ID NO:25 and a nucleotide sequence containing at least 25, 50, 100, 150, 200, 500, 1000, 1500, 2000, 2500, 3000, or more nucleotides of the nucleotide sequence shown in SEQ ID NO:11.

[0144] In another embodiment, the nucleic acid molecule includes a fusion, e.g., an in-frame fusion, of at least 1, 2 or more exons of ZCCHC8 or a fragment thereof (e.g., one or more of exons 1-2 of ZCCHC8 or a fragment thereof), and at least 1, 2, 3, 4, 5, 6, 7, 8 or more exons of ROS1 or a fragment thereof (e.g., one or more of exons 36-43 of ROS1 or a fragment thereof). In yet other embodiments, the nucleic acid molecule includes a fragment the nucleotide sequence shown in SEQ ID NO:25 and a fragment of the nucleotide sequence shown in SEQ ID NO: 11 or a fragment of the fusion, or a sequence substantially identical thereto.

[0145] In one embodiment, the nucleic acid molecule is complementary to at least a portion of a nucleotide sequence disclosed herein, e.g., is capable of hybridizing under a stringency condition described herein to SEQ ID NO:25 and/or SEQ ID NO: 11, or a fragment thereof. In yet another embodiment, the nucleic acid molecule hybridizes to a nucleotide sequence that is complementary to at least a portion of a nucleotide sequence disclosed herein, e.g., is capable of hybridizing under a stringency condition to a nucleotide sequence complementary to SEQ ID NO:25 and/or SEQ ID NO: 11, or a fragment thereof. The nucleotide sequence of a cDNA encoding an exemplary 5′ ZCCHC8-3′ ROS1 fusion is shown in at least exons 1-2 (e.g., exons 1-2) of SEQ ID NO:25 and at least exon 36 (e.g., exons 36-43) of SEQ ID NO: 11, and the predicted amino acid sequence is shown in the corresponding encoded exons of SEQ ID NO:26 and the corresponding encoded exons of SEQ ID NO: 12, respectively.

[0146] In an embodiment the ZCCHC8-ROS1 nucleic acid molecule comprises sufficient ZCCHC8 and sufficient ROS1 sequence such that the encoded 5′ ZCCHC8-3′ ROS1 fusion has kinase activity, e.g., has elevated activity. In certain embodiments, the 5′ ZCCHC8-3′ ROS1 fusion comprises exons 1-2 from ZCCHC8 and exons 36-43 from ROS1. In certain embodiments, the ZCCHC8-ROS1 fusion comprises at least 1, 2 or more exons from ZCCHC8 and at least at least 1, 2, 3, 4, 5, 6, 7, 8 or more exons of ROS1. In certain embodiments, the ZCCHC8-ROS1 fusion comprises a fusion of exons 1-2 from ZCCHC8 and exon 36 from ROS1. In another embodiment, the ZCCHC8-ROS1 fusion comprises 1 or more exons of ZCCHC8; and at least 1, 2, 3, 4, 5, 6, 7, 8 or more exons of ROS1.

[0147] In one embodiment, the nucleic acid molecule includes a nucleotide sequence that has an in-frame fusion of intron 1 of ZCCHC8 (e.g., NM_{—}017612) with intron 35 of ROS1 (e.g., NM_{—}002944). In another embodiment, the nucleic acid molecule includes a nucleotide sequence that includes a breakpoint. For example, the nucleic acid molecule includes a nucleotide sequence that includes the fusion junction between the ZCCHC8 gene and the ROS1 gene, e.g., the breakpoint between intron 1 of ZCCHC8 and intron 35 of ROS1. In other embodiments, the nucleic acid molecules includes a nucleotide sequence of one or more of nucleotide of chromosome 12 coupled to (e.g., directly or indirectly juxtaposed to) one or more of nucleotide of chromosome 6. In one embodiment, the nucleic acid molecule includes the nucleotide sequence of: chromosome 12 at one or more of a nucleotide plus or minus 10, 20, 30, 40 50, 60, 80, 100, 150 nucleotides and chromosome 6 at one or more of a nucleotide plus or minus 10, 20, 30, 40 50, 60, 80, 100, 150 nucleotides (corresponding to the breakpoint of a ZCCHC8-ROS1 fusion), or a fragment thereof, or a sequence substantially identical thereto. In one embodiment, the nucleic acid molecule is complementary to at least a portion of a nucleotide sequence disclosed herein, e.g., is capable of hybridizing under a stringency condition described herein to SEQ ID NO:25 and/or SEQ ID NO: 11 or a fragment thereof. In yet other embodiment, the nucleic acid molecule hybridizes to a nucleotide sequence that is complementary to at least a portion of a nucleotide sequence disclosed herein, e.g., is capable of hybridizing under a stringency condition described herein to a nucleotide sequence complementary to SEQ ID NO:25 or SEQ ID NO: 11 or a fragment thereof.

[0148] In another embodiment, the ZCCHC8-ROS1 fusion nucleic acid comprises at least 6, 12, 15, 20, 25, 50, 75, 100 or more nucleotides from exons 1-2 of ZCCHC8 (e.g., from the nucleotide sequence of ZCCHC8 preceding the fusion junction with ROS1, e.g., of the ZCCHC8 sequence shown in SEQ ID NO:25), and at least 6, 12, 15, 20, 25, 50, 75, 100 or more nucleotides from exon 36 of ROS1 (e.g., from the nucleotide sequence of ROS1 following the fusion junction with ZCCHC8, e.g., of the ROS1 sequence shown in SEQ ID NO: 11)).

[0149] In other embodiments, the nucleic acid molecule includes a nucleotide sequence encoding a ZCCHC8-ROS1 fusion polypeptide that includes a fragment of a ZCCHC8 gene and a fragment of a ROS1 gene. In one embodiment, the nucleotide sequence encodes a ZCCHC8-ROS1 fusion polypeptide that includes e.g., a tyrosine kinase domain or a functional fragment thereof. In yet other embodiments, the nucleic acid molecule includes a nucleotide sequence encoding the amino acid sequence (e.g., a fragment of the amino acid sequence) shown in SEQ ID NO:26 and a nucleotide sequence encoding the amino acid sequence (e.g., a fragment of the amino acid sequence) shown in SEQ ID NO:12, or a fragment of the fusion, or a sequence substantially identical thereto. In one embodiment, the encoded ZCCHC8-ROS1 fusion polypeptide includes a tyrosine kinase domain or a functional fragment thereof.

[0150] In one embodiment, the ZCCHC8-ROS1 fusion includes the full sequence or a fragment of the nucleotide sequence shown in SEQ ID NO:23 and SEQ ID NO:96, or a nucleotide sequence substantially identical thereto. In another embodiment, the ZCCHC8-ROS1 fusion polypeptide includes the full sequence or a fragment of the amino acid sequence shown in SEQ ID NO:24 and SEQ ID NO:97, or an amino acid sequence substantially identical thereto, at least 70% or 80% or 905 or more identical.

[0151] In a related aspect, the invention features nucleic acid constructs that include the ZCCHC8-ROS1 nucleic acid molecules described herein. In certain embodiments, the nucleic acid molecules are operatively linked to a native or a heterologous regulatory sequence. Also included are vectors and host cells that include the ZCCHC8-ROS1 nucleic acid molecules described herein, e.g., vectors and host cells suitable for producing the nucleic acid molecules and polypeptides described herein.

[0152] In a related aspect, methods of producing the nucleic acid molecules and polypeptides described herein are also described.

[0153] In another aspect, the invention features nucleic acid molecules that reduce or inhibit the expression of a nucleic acid molecule that encodes a ZCCHC8-ROS1 fusion described herein. Examples of such nucleic acid molecules include, for example, antisense molecules, ribozymes, RNAi, triple helix molecules that hybridize to a nucleic acid encoding ZCCHC8-ROS1 or a transcription regulatory region of ZCCHC8-ROS1, and blocks or reduces mRNA expression of ZCCHC8-ROS1.

### Nucleic Acid Detection and Capturing Reagents

[0154] The invention also features a nucleic acid molecule, e.g., nucleic acid fragment, suitable as probe, primer, bait or library member that includes, flanks, hybridizes to, which are useful for identifying, or are otherwise based on, the ZCCHC8-ROS1 fusions described herein. In certain embodiments, the probe, primer or bait molecule is an oligonucleotide that allows capture, detection or isolation of a ZCCHC8-ROS1 fusion nucleic acid molecule described herein. The oligonucleotide can comprise a nucleotide sequence substantially complementary to a fragment of the ZCCHC8-ROS1 fusion nucleic acid molecules described herein. The sequence identity between the nucleic acid fragment, e.g., the oligonucleotide, and the target ZCCHC8-ROS1 sequence need not be exact, so long as the sequences are sufficiently complementary to allow the capture, detection or isolation of the target sequence. In one embodiment, the nucleic acid fragment is a probe or primer that includes an oligonucleotide between about 5 and 25, e.g., between 10 and 20, or 10 and 15 nucleotides in length. In other embodiments, the nucleic acid fragment is a bait that includes an oligonucleotide between about 100 to 300 nucleotides, 130 and 230 nucleotides, or 150 and 200 nucleotides, in length.

[0155] In one embodiment, the nucleic acid fragment can be used to identify or capture. e.g., by hybridization, a ZCCHC8-ROS1 fusion. For example, the nucleic acid fragment can be a probe, a primer, or a bait, for use in identifying or capturing, e.g., by hybridization, a ZCCHC8-ROS1 fusion described herein. In one embodiment, the nucleic acid fragment can be useful for identifying or capturing a ZCCHC8-ROS1 breakpoint, e.g., the nucleotide sequence of: chromosome 12 at nucleotide plus or minus 10, 20, 30, 40, 50, 60, 80, 100, 150 nucleotides and chromosome 6 at nucleotide plus or minus 10, 20, 30, 40 50, 60, 80, 100, 150 nucleotides.

[0156] In one embodiment, the nucleic acid fragment hybridizes to a nucleotide sequence within a chromosomal rearrangement that creates an in-frame fusion of intron 1 of ZCCHC8 with intron 35 of ROS1. In one embodiment, the nucleic acid fragment hybridizes to a nucleotide sequence in the region In other embodiments, the nucleic acid molecules includes a nucleotide sequence in the region of a nucleotide sequence of chromosome 12 coupled to (e.g., juxtaposed to) nucleotides in the region of a nucleotide sequence of chromosome 6. In one embodiment, the nucleic acid fragment hybridizes to a nucleotide sequence that includes a breakpoint, e.g., the nucleotide sequence of: chromosome 12 at nucleotide plus or minus 10, 20, 30, 40, 50, 60, 80, 100, 150 or more nucleotides and chromosome 6 at nucleotide plus or minus 10, 20, 30, 40, 50, 60, 80, 100, 150 or more nucleotides. For example, the nucleic acid fragment can hybridize to a nucleotide sequence that includes the fusion junction between the ZCCHC8 gene and the ROS1 gene, e.g., a nucleotide sequence that includes a portion of a nucleotide sequence within intron 1 of a ZCCHC8 gene and intron 35 of a ROS1 gene.

[0157] In another embodiment, the nucleic acid fragment hybridizes to a nucleotide sequence that comprises at least 6, 12, 15, 20, 25, 50, 75, 100, 150 or more nucleotides from exons 1-2 of ZCCHC8 (e.g., from the nucleotide sequence of ZCCHC8 preceding the fusion junction with ROS1, e.g., of the ZCCHC8 sequence shown in SEQ ID NO:25), and at least 6, 12, 15, 20, 25, 50, 75, 100, 150 or more nucleotides from exon 36 of ROS1 (e.g., from the nucleotide sequence of ROS1 following the fusion junction with ZCCHC8. e.g., of the ROS1 sequence shown in SEQ ID NO: 1).

[0158] The probes or primers described herein can be used, for example, for FISH detection or PCR amplification. In one exemplary embodiment where detection is based on PCR, amplification of the ZCCHC8-ROS1 fusion junction fusion junction can be performed using a primer or a primer pair, e.g., for amplifying a sequence flanking the fusion junctions described herein, e.g., the mutations or the junction of a chromosomal rearrangement described herein, e.g., ZCCHC8-ROS1.

[0159] In one embodiment, a pair of isolated oligonucleotide primers can amplify a region containing or adjacent to a position in the ZCCHC8-ROS1 fusion. For example, forward primers can be designed to hybridize to a nucleotide sequence within ZCCHC8 genomic or mRNA sequence (e.g., a nucleotide sequence within exons 1-2 of ZCCHC8 of SEQ ID NO:25), and the reverse primers can be designed to hybridize to a nucleotide sequence of ROS1 (e.g., a nucleotide sequence within exon 36 of ROS1, of SEQ ID NO: 11).

[0160] In another embodiment, the nucleic acid fragments can be used to identify, e.g., by hybridization, a ZCCHC8-ROS1 fusion. In one embodiment, the nucleic acid fragment hybridizes to a nucleotide sequence that includes a fusion junction between the ZCCHC8 transcript and the ROS1 transcript.

[0161] In other embodiments, the nucleic acid fragment includes a bait that comprises a nucleotide sequence that hybridizes to a ZCCHC8-ROS1 fusion nucleic acid molecule described herein, and thereby allows the capture or isolation said nucleic acid molecule. In one embodiment, a bait is suitable for solution phase hybridization. In other embodiments, a bait includes a binding entity, e.g., an affinity tag, that allows capture and separation, e.g., by binding to a binding entity, of a hybrid formed by a bait and a nucleic acid hybridized to the bait.

[0162] In other embodiments, the nucleic acid fragment includes a library member comprising a ZCCHC8-ROS1 nucleic acid molecule described herein. In one embodiment, the library member includes a rearrangement that results in a ZCCHC8-ROS1 fusion described herein.

[0163] The nucleic acid fragment can be detectably labeled with, e.g., a radiolabel, a fluorescent label, a bioluminescent label, a chemiluminescent label, an enzyme label, a binding pair label, or can include an affinity tag; a tag, or identifier (e.g., an adaptor, barcode or other sequence identifier).

### ZCCHC8-ROS1 Fusion Polypeptides

[0164] In another embodiment, the ZCCHC8-ROS1 fusion comprises an amino acid sequence (e.g., a fragment of the amino acid sequence) shown in SEQ ID NO:26 and an amino acid sequence (e.g., a fragment of the amino acid sequence) shown in SEQ ID NO:12, or a fragment of the fusion. In one embodiment, the ZCCHC8-ROS1 fusion comprises an amino acid sequence substantially identical to the amino acid sequence (e.g., a fragment of the amino acid sequence) shown in SEQ ID NO:26 and the amino acid sequence (e.g., a fragment of the amino acid sequence) shown in SEQ ID NO:12, or a fragment thereof. In one embodiment, the ZCCHC8-ROS1 fusion comprises an amino acid sequence at least 70%, at least 75%, at least 80%, at least 85%, at least 90%, at least 95%, at least 99%, at least 99.5 or greater, identical to the amino acid sequence (e.g., a fragment of the amino acid sequence) shown in SEQ ID NO:26 and the amino acid sequence (e.g., a fragment of the amino acid sequence) shown in SEQ ID NO:12. In one embodiment, the ZCCHC8-ROS1 fusion comprises a sequence containing at least 10, 20, 50, 100, 500, 600, 700, 800, 900, 1000, or more amino acids of the amino acid sequence shown in SEQ ID NO:26 and SEQ ID NO: 12. In one embodiment, the ZCCHC8-ROS1 fusion comprises an amino acid sequence containing at least 5, 10, 20, 50, 100, 500, 600, 700, 800, 900, 1000, or more contiguous amino acids of the amino acid sequence shown in SEQ ID NO:26 and at least 5, 10, 20, 50, 100, 500, 600, 700, 800, 900, 1000, or more contiguous amino acids of the amino acid sequence shown in SEQ ID NO:12. In one embodiment, the 5′ ZCCHC8-3′ ROS1 fusion polypeptide includes a receptor tyrosine kinase domain or a functional fragment thereof. In an embodiment, the 5′ZCCHC8-3′ROS1 fusion polypeptide comprises sufficient ROS1 and sufficient ZCCHC8 sequence such that it has kinase activity, e.g., has elevated activity.

[0165] In another aspect, the invention features a ZCCHC8-ROS1 fusion polypeptide (e.g., a purified ZCCHC8-ROS1 fusion polypeptide), a biologically active or antigenic fragment thereof, as well as reagents (e.g., antibody molecules that bind to a ZCCHC8-ROS1 fusion polypeptide), methods for modulating a ZCCHC8-ROS1 polypeptide activity and detection of a ZCCHC8-ROS1 polypeptide.

[0166] In one embodiment, the ZCCHC8-ROS1 fusion polypeptide has at least one biological activity. In one embodiment, at least one biological activity of the ZCCHC8-ROS1 fusion polypeptide is reduced or inhibited by an anti-cancer drug, e.g., a ZCCHC8 inhibitor, a ROS1 inhibitor. In one embodiment, at least one biological activity of the ZCCHC8-ROS1 fusion polypeptide is reduced or inhibited by a ROS1 inhibitor. In one embodiment, at least one biological activity of the ZCCHC8-ROS1 fusion polypeptide is reduced or inhibited by a ZCCHC8 inhibitor. In one embodiment, at least one biological activity of the ZCCHC8-ROS1 fusion polypeptide is reduced or inhibited by a ROS1 inhibitor, e.g., Ganetespib; Crizotinib; TAE684; a dual ALK and ROS1 inhibitor.

[0167] In yet other embodiments, the ZCCHC8-ROS1 fusion polypeptide is encoded by a nucleic acid molecule described herein. In one embodiment, the ZCCHC8-ROS1 fusion polypeptide is encoded by an in-frame fusion of intron 1 of ZCCHC8 with intron 35 of ROS1 (e.g., a sequence on chromosome 12 and a sequence on chromosome 6). In another embodiment, the ZCCHC8-ROS1 fusion polypeptide includes an amino acid sequence encoded by a nucleotide sequence comprising a fusion junction between the ZCCHC8 transcript and the ROS1 transcript.

[0168] In certain embodiments, the ZCCHC8-ROS1 fusion polypeptide comprises one or more of encoded exons 1-2 from ZCCHC8 and one or more of encoded exons 36-43 of ROS1. In certain embodiments, the ZCCHC8-ROS1 fusion polypeptide comprises at least 1, 2 or more encoded exons of ZCCHC8 and at least at least 1, 2, 3, 4, 5, 6, 7, 8 or more encoded exons of ROS1. In certain embodiments, the ZCCHC8-ROS1 fusion polypeptide comprises a fusion of encoded exons 1-2 from ZCCHC8 and encoded exon 36 from ROS1 (or a fragment thereof). In other embodiments, the fusion comprises at least 1 or more encoded exons of ZCCHC8; and at least 1, 2, 3, 4, 5, 6, 7, 8 or more encoded exons of ROS1. In certain embodiments, the ZCCHC8-ROS1 fusion polypeptide comprises encoded exons 1-2 from ZCCHC8 and exons 36-43 of ROS1. In certain embodiments, the 5′ ZCCHC8-3′ ROS1 fusion polypeptide comprises a fusion junction of the sequence of exons 1-2 from ZCCHC8 and the sequence of exon 36 from ROS1.

[0169] In certain embodiments, the ZCCHC8-ROS1 fusion comprises the amino acid sequence corresponding to exons 1-2 or a fragment thereof from ZCCHC8, and the amino acid sequence corresponding to exon 36 or a fragment thereof from ROS1 (e.g., as shown in SEQ ID NO:26 and SEQ ID NO:12). In one embodiment, the ZCCHC8-ROS1 fusion comprises at least 5, 10, 15, 20 or more amino acids from exons 1-2 of ZCCHC8 (e.g., from the amino acid sequence of ZCCHC8 preceding the fusion junction with ROS1, e.g., of the ZCCHC8 sequence shown in SEQ ID NO:26), and at least 5, 10, 15, 20 or more amino acids from exon 36 of ROS1 (e.g., from the amino acid sequence of ROS1 following the fusion junction with ZCCHC8, e.g., of the ROS1 sequence shown in SEQ ID NO: 12).

[0170] In one embodiment, the ZCCHC8-ROS1 fusion polypeptide includes a tyrosine kinase domain or a functional fragment thereof. In a related aspect, the invention features ZCCHC8-ROS1 fusion polypeptide or fragments operatively linked to heterologous polypeptides to form fusion proteins.

[0171] In another embodiment, the ZCCHC8-ROS1 fusion polypeptide or fragment is a peptide, e.g., an immunogenic peptide or protein. This peptide or protein contains a fusion junction described herein. Such immunogenic peptides or proteins can be used to raise antibodies specific to the fusion protein. In other embodiments, such immunogenic peptides or proteins can be used for vaccine preparation. The vaccine preparation can include other components, e.g., an adjuvant.

[0172] In another aspect, the invention features antibody molecules that bind to a ZCCHC8-ROS1 fusion polypeptide or fragment described herein. In embodiments, the antibody can distinguish wild type ROS1 (or ZCCHC8) from ZCCHC8-ROS1.

### Detection Reagents and Detection of Mutations

[0173] In another aspect, the invention features a detection reagent, e.g., a purified or an isolated preparation thereof. Detection reagents can distinguish a nucleic acid, or protein sequence, having a breakpoint, e.g., a ZCCHC8-ROS1 breakpoint; from a reference sequence. In one embodiment, the detection reagent detects (e.g., specifically detects) a ZCCHC8-ROS1 fusion nucleic acid or a polypeptide, e.g., distinguishes a wild type ROS1 or another ROS1 fusion (or ZCCHC8) from a ZCCHC8-ROS1 nucleic acid (e.g., as described herein in SEQ ID NO:25 and SEQ ID NO: 11); or a ZCCHC8-ROS1 polypeptide (e.g., as described herein in SEQ ID NO:26 and SEQ ID NO: 12).

[0174] Detection reagents, e.g., nucleic acid-based detection reagents, can be used to identify mutations in a target nucleic acid, e.g., DNA, e.g., genomic DNA or cDNA, or RNA, e.g., in a sample, e.g., a sample of nucleic acid derived from a neoplastic or tumor cell, e.g., a melanocytic neoplasm, melanoma or metastatic cell. Detection reagents, e.g., antibody-based detection reagents, can be used to identify mutations in a target protein, e.g., in a sample, e.g., a sample of protein derived from, or produced by, a neoplastic or tumor cell, e.g., a melanocytic neoplasm, melanoma or metastatic cell.

### Method of Treatment

[0175] In a related aspect, a method of inhibiting, reducing, or treating a hyperproliferative disorder, e.g., a neoplasm (including benign, pre-malignant or malignant (e.g., a cancer), in a subject is provided. The method includes administering to the subject a preselected therapeutic agent. e.g., an anti-cancer agent (e.g., a kinase inhibitor), as a single agent, or in combination, in an amount sufficient to reduce, inhibit or treat the activity or expression of ZCCHC8-ROS1 (e.g., a ZCCHC8-ROS1 fusion described herein), thereby inhibiting, reducing, or treating the hyperproliferative disorder in the subject.

[0176] In one embodiment, the subject treated has a ZCCHC8-ROS1 fusion; e.g., the subject has a tumor or cancer harboring a ZCCHC8-ROS1 fusion. In other embodiments, the subject has been previously identified as having a ZCCHC8-ROS1 fusion. In yet other embodiments, the subject has been previously identified as being likely or unlikely to respond to treatment with a protein kinase inhibitor, e.g., a subject that has previously participated in a clinical trial. In other embodiments, the subject has been previously identified as being likely or unlikely to respond to treatment with a protein kinase inhibitor, based on the presence of the ZCCHC8-ROS1 fusion. In one embodiment, the subject is a mammal, e.g., a human. In one embodiment, the subject has, or at risk of having a cancer at any stage of disease. In other embodiments, the subject is a patient, e.g., a cancer patient, particularly a melanoma patient having such a fusion.

[0177] In certain embodiments, the neoplasm or neoplastic cell is a benign, pre-malignant, malignant (cancer) or metastasis. In certain embodiments, the cancer is a solid tumor, a soft tissue tumor, or a metastatic lesion.

[0178] In one embodiment, the neoplasm or neoplastic cell is a benign, pre-malignant, malignant (cancer) or metastasis. In certain embodiments, the cancer is a solid tumor, a soft tissue tumor, or a metastatic lesion. In one embodiment, the cancer is a carcinoma. In one embodiment, the cancer is an adenocarcinoma. In an embodiment, the cancer is a lung adenocarcinoma. In one embodiment, the cancer is chosen from a lung cancer, a pancreatic cancer, melanoma, a colorectal cancer, an esophageal-gastric cancer, a thyroid cancer, or an adenocarcinoma. In one embodiment, the cancer is a lung adenocarcinoma. In other embodiment, the lung cancer is chosen from one or more of the following: non-small cell lung cancer (NSCLC), small cell lung cancer (SCLC), squamous cell carcinoma (SCC), adenocarcinoma of the lung, bronchogenic carcinoma, or a combination thereof. In one embodiment, the lung cancer is NSCLC or SCC.

[0179] In one embodiment, the anti-cancer agent is a ROS1 inhibitor. In one embodiment, the anti-cancer agent is a ZCCHC8 inhibitor. In one embodiment, the anti-cancer agent is a kinase inhibitor. In one embodiment, the anti-cancer agent is a ROS1 inhibitor, e.g., Ganetespib; Crizotinib; TAE684; AP26113, X-276, X-376, X-396, CH5424802 (AF-802), GSK1838705, ASP3026, PHA-E429, CRL151104; and additional examples of kinase inhibitors are described in de la Bellacasa R. P. et al, Transl Lung Cancer Res 2013; 2(2):72-86.

### MYO5A-ROS1 Fusions

[0180] In one embodiment, a fusion includes an in-frame fusion of an exon of myosin VA (heavy chain 12 myoxin) (MYO5A), e.g., one more exons of MYO5A (e.g., one or more of exons 1-23 of MYO5A) or a fragment thereof, and an exon of C-Ros oncogene 1 (ROS1), e.g., one or more exons of a ROS1 (e.g., one or more of exons 35-43 of ROS1) or a fragment thereof. For example, the MYO5A-ROS1 fusion can include an in-frame fusion within an intron of MYO5A (e.g., intron 23) or a fragment thereof, with an intron of ROS1 (e.g., intron 34) or a fragment thereof. In one embodiment, the fusion of the MYO5A-ROS1 fusion comprises the nucleotide sequence of: chromosome 15 at one or more of a nucleotide (plus or minus 10, 20, 30, 50, 60, 70, 80, 100 or more nucleotides) and chromosome 6 at one or more of a nucleotide (plus or minus 10, 20, 30, 50, 60, 70, 80, 100 or more nucleotides). In one embodiment, the MYO5A-ROS1 fusion is a translocation, e.g., a translocation of a portion of chromosome 15 and a portion of chromosome 6.

[0181] In certain embodiments, the MYO5A-ROS1 fusion is in a 5′-MYO5A to 3′-ROS1 configuration (also referred to herein as “5′-MYO5A-ROS1-3′).” The term “fusion” or “fusion molecule” can refer to a polypeptide or a nucleic acid fusion, depending on the context. It may include a full-length sequence of a fusion or a fragment thereof, e.g., a fusion junction (e.g., a fragment including a portion of MYO5A and a portion of ROS1. e.g., a portion of the MYO5A-ROS1 fusion described herein). In one embodiment, the MYO5A-ROS1 fusion polypeptide includes a fragment of the amino acid sequence shown in SEQ ID NO:30 and a fragment of the amino acid sequence shown in SEQ ID NO: 12, or an amino acid sequence substantially identical thereto. In another embodiment, the MYO5A-ROS1 fusion nucleic acid includes a fragment of the nucleotide sequence shown in SEQ ID NO:29 and a fragment of the nucleotide sequence shown in SEQ ID NO: 11, or a nucleotide sequence substantially identical thereto. In one embodiment, the MYO5A-ROS1 fusion polypeptide comprises sufficient MYO5A and sufficient ROS1 sequence such that the 5′ MYO5A-3′ ROS1 fusion has kinase activity, e.g., has elevated activity, e.g., tyrosine kinase activity. In any event, the fusion causes activation in the cells harboring it of oncogenic signaling pathways

[0182] In certain embodiments, the MYO5A-ROS1 fusion comprises one or more (or all of) exons 1-23 from MYO5A and one or more (or all of) exons 35-43 of ROS1 (e.g., one or more of the exons shown in SEQ ID NO:29 and SEQ ID NO: 11. In another embodiment, the MYO5A-ROS1 fusion comprises one or more (or all of) exons 1-23 of MYO5A and one or more (or all of) exons 35-43 of ROS1. In certain embodiments, the MYO5A-ROS1 fusion comprises at least 1, 2, 3, 4, 5, 6, 7, 8, 9, 10, 11, 12, 13, 14, 15, 16, 17, 18, 19, 20, 21, 22, 23 or more exons (or encoded exons) from MYO5A and at least 1, 2, 3, 4, 5, 6, 7, 8, 9 or more exons (or encoded exons) from ROS1 (e.g., from the MYO5A and ROS1 sequences shown in SEQ ID NO:29 and SEQ ID NO:30 and SEQ ID NO: 11 and SEQ ID NO:12.

[0183] In certain embodiments, the MYO5A-ROS1 fusion comprises exons 1-23 or a fragment thereof from MYO5A, and exons 35-43 or a fragment thereof from ROS1 (e.g., as shown in SEQ ID NO:29 and SEQ ID NO:11). In one embodiment, the MYO5A-ROS1 fusion comprises at least 5, 10, 15, 20, 30, 40, 50 or more amino acids from exons 1-23 of MYO5A (e.g., from the amino acid sequence of MYO5A as shown in SEQ ID NO:30 (e.g., from the amino acid sequence of MYO5A preceding the fusion junction with ROS1, and at least 5, 10, 15, 20, 30, 40, 50 or more amino acids from exons 35-43 of ROS1 (e.g., from the amino acid sequence of ROS1 as shown in SEQ ID NO: 12). In another embodiment, the MYO5A-ROS1 fusion comprises at least 6, 12, 15, 20, 25, 50, 75, 100 or more nucleotides from exons 1-23 of MYO5A (e.g., from the nucleotide sequence of MYO5A as shown in 125 (SEQ ID NO:29) (e.g., from the nucleotide sequence of MYO5A preceding the fusion junction with ROS1); and at least 6, 12, 15, 20, 25, 50, 75, 100 or more nucleotides from exons 35-43 of ROS1 (e.g., from the nucleotide sequence of ROS1 as shown in 112 (SEQ ID NO: 11)).

### MYO5A-ROS1 Nucleic Acid Molecules

[0184] In one aspect, the invention features a nucleic acid molecule (e.g., an isolated or purified) nucleic acid molecule that includes a fragment of a MYO5A gene and a fragment of a ROS1 gene. In one embodiment, the nucleotide sequence encodes a MYO5A-ROS1 fusion polypeptide that includes a tyrosine kinase domain or a functional fragment thereof. In another embodiment, the nucleotide sequence encodes a fragment of the ROS1 polypeptide including the amino acid sequence of SEQ ID NO: 12 or a fragment thereof, or a sequence substantially identical thereto. In other embodiments, the nucleic acid molecule includes a fragment of the MYO5A gene encoding the amino acid sequence of SEQ ID NO:30 or a fragment thereof, or a sequence substantially identical thereto. In yet other embodiments, the nucleic acid molecule includes a nucleotide sequence encoding the amino acid sequence shown in 126 SEQ ID NO:30, or a fragment thereof, and the amino acid sequence shown in 113 SEQ ID NO: 12 or a fragment thereof, or a sequence substantially identical thereto.

[0185] In one embodiment, the nucleic acid molecule includes a fusion, e.g., an in-frame fusion, between an intron of MYO5A (e.g., intron 23, or a fragment thereof), and an intron of ROS1 (e.g., intron 34, or a fragment thereof). The MYO5A-ROS1 fusion can comprise a fusion of the nucleotide sequence of: chromosome 15 at one or more of a nucleotide (plus or minus 10, 20, 30, 50, 60, 70, 80, 100 nucleotides) and chromosome 6 at one or more of a nucleotide (plus or minus 10, 20, 30, 50, 60, 70, 80, 100 nucleotides), or a fragment thereof. In one embodiment, the MYO5A-ROS1 fusion comprises a fusion of the nucleotide sequence of: chromosome 15 at one or more of a nucleotide (plus or minus 10, 20, 30, 50, 60, 70, 80, 100 nucleotides) and chromosome 6 at one or more of a nucleotide (plus or minus 10, 20, 30, 50, 60, 70, 80, 100 nucleotides), or a fragment thereof.

[0186] In another embodiment, the MYO5A-ROS1 fusion comprises a nucleotide sequence (e.g., a fragment of a nucleotide sequence) shown in 125 SEQ ID NO:29 and a nucleotide sequence (e.g., a fragment of a nucleotide sequence) shown in SEQ ID NO: 11, or a fragment of the fusion. In one embodiment, the MYO5A-ROS1 fusion comprises a nucleotide sequence substantially identical to the nucleotide sequence (e.g., a fragment of a nucleotide sequence) shown in SEQ ID NO:29 and the nucleotide sequence (e.g., a fragment of a nucleotide sequence) shown SEQ ID NO: 11, or a fragment of the fusion. In one embodiment, the MYO5A-ROS1 fusion comprises a nucleotide sequence at least 70%, at least 75%, at least 80%, at least 85%, at least 90%, at least 95%, at least 99%, at least 99.5 or greater, identical to the nucleotide sequence (e.g., a fragment of a nucleotide sequence) shown in SEQ ID NO:29 and to the nucleotide sequence (e.g., a fragment of a nucleotide sequence) shown in SEQ ID NO: 11. In one embodiment, the MYO5A-ROS1 fusion comprises a nucleotide sequence containing at least 25, 50, 100, 150, 200, 500, 1000, 1500, 2000, 2500, 3000, or more nucleotides of the nucleotide sequence shown in SEQ ID NO:29 and a nucleotide sequence containing at least 25, 50, 100, 150, 200, 500, 1000, 1500, 2000, 2500, 3000, or more nucleotides of the nucleotide sequence shown in SEQ ID NO: 11. In one embodiment, the MYO5A-ROS1 fusion comprises a nucleotide sequence containing at least 25, 50, 100, 150, 200, 500, 1000, 1500, 2000, 2500, 3000, or more contiguous nucleotides of the nucleotide sequence shown in SEQ ID NO:29 and a nucleotide sequence containing at least 25, 50, 100, 150, 200, 500, 1000, 1500, 2000, 2500, 3000, or more nucleotides of the nucleotide sequence shown in SEQ ID NO:11.

[0187] In another embodiment, the nucleic acid molecule includes a fusion, e.g., an in-frame fusion, of at least 1, 2, 3, 4, 5, 6, 7, 8, 9, 10, 11, 12, 13, 14, 15, 16, 17, 18, 19, 20, 21, 22, 23 or more exons of MYO5A or a fragment thereof (e.g., one or more of exons 1-23 of MYO5A or a fragment thereof), and at least 1, 2, 3, 4, 5, 6, 7, 8, 9 or more exons of ROS1 or a fragment thereof (e.g., one or more of exons 35-43 of ROS1 or a fragment thereof). In yet other embodiments, the nucleic acid molecule includes a fragment the nucleotide sequence shown in SEQ ID NO:29 and a fragment of the nucleotide sequence shown in SEQ ID NO:11 or a fragment of the fusion, or a sequence substantially identical thereto.

[0188] In one embodiment, the nucleic acid molecule is complementary to at least a portion of a nucleotide sequence disclosed herein, e.g., is capable of hybridizing under a stringency condition described herein to SEQ ID NO:29 and/or SEQ ID NO: 11, or a fragment thereof. In yet another embodiment, the nucleic acid molecule hybridizes to a nucleotide sequence that is complementary to at least a portion of a nucleotide sequence disclosed herein, e.g., is capable of hybridizing under a stringency condition to a nucleotide sequence complementary to SEQ ID NO:29 and/or SEQ ID NO: 11, or a fragment thereof. The nucleotide sequence of a cDNA encoding an exemplary 5′ MYO5A-3′ ROS1 fusion is shown in at least exon 23 (e.g., exons 1-23) of SEQ ID NO:29 and at least exon 35 (e.g., exons 35-43) of SEQ ID NO: 11, and the predicted amino acid sequence is shown in the corresponding encoded exons of SEQ ID NO:30 and the corresponding encoded exons of SEQ ID NO: 12, respectively.

[0189] In an embodiment the MYO5A-ROS1 nucleic acid molecule comprises sufficient MYO5A and sufficient ROS1 sequence such that the encoded 5′ MYO5A-3′ ROS1 fusion has kinase activity, e.g., has elevated activity. In certain embodiments, the 5′ MYO5A-3′ ROS1 fusion comprises exons 1-23 from MYO5A and exons 35-43 from ROS1. In certain embodiments, the MYO5A-ROS1 fusion comprises at least 1, 2, 3, 4, 5, 6, 7, 8, 9, 10, 11, 12, 13, 14, 15, 16, 17, 18, 19, 20, 21, 22, 23 or more exons from MYO5A and at least at least 1, 2, 3, 4, 5, 6, 7, 8, or more exons of ROS1. In certain embodiments, the MYO5A-ROS1 fusion comprises a fusion of exon 23 from MYO5A and exon 35 from ROS1. In another embodiment, the MYO5A-ROS1 fusion comprises 1, 2, 3, 4, 5, 6, 7, 8, 9, 10, 1, 12, 13, 14, 15, 16, 17, 18, 19, 20, 21, 22, 23 or more exons of MYO5A; and at least 1, 2, 3, 4, 5, 6, 7, 8, 9 or more exons of ROS1.

[0190] In one embodiment, the nucleic acid molecule includes a nucleotide sequence that has an in-frame fusion of intron 23 of MYO5A (e.g., NM_{—}000259) with intron 34 of ROS1 (e.g., NM_{—}002944). In another embodiment, the nucleic acid molecule includes a nucleotide sequence that includes a breakpoint. For example, the nucleic acid molecule includes a nucleotide sequence that includes the fusion junction between the MYO5A gene and the ROS1 gene, e.g., the breakpoint between intron 23 of MYO5A and intron 34 of ROS1. In other embodiments, the nucleic acid molecules includes a nucleotide sequence of one or more of nucleotide of chromosome 15 coupled to (e.g., directly or indirectly juxtaposed to) one or more of nucleotide of chromosome 6. In one embodiment, the nucleic acid molecule includes the nucleotide sequence of: chromosome 15 at one or more of a nucleotide plus or minus 10, 20, 30, 40 50, 60, 80, 100, 150 nucleotides and chromosome 6 at one or more of a nucleotide plus or minus 10, 20, 30, 40, 50, 60, 80, 100, 150 nucleotides (corresponding to the breakpoint of a MYO5A-ROS1 fusion), or a fragment thereof, or a sequence substantially identical thereto. In one embodiment, the nucleic acid molecule is complementary to at least a portion of a nucleotide sequence disclosed herein, e.g., is capable of hybridizing under a stringency condition described herein to SEQ ID NO:29 and/or SEQ ID NO:11 or a fragment thereof. In yet other embodiment, the nucleic acid molecule hybridizes to a nucleotide sequence that is complementary to at least a portion of a nucleotide sequence disclosed herein, e.g., is capable of hybridizing under a stringency condition described herein to a nucleotide sequence complementary to SEQ ID NO:29 or SEQ ID NO: 1 or a fragment thereof.

[0191] In another embodiment, the MYO5A-ROS1 fusion nucleic acid comprises at least 6, 12, 15, 20, 25, 50, 75, 100 or more nucleotides from exon 23 of MYO5A (e.g., from the nucleotide sequence of MYO5A preceding the fusion junction with ROS1, e.g., of the MYO5A sequence shown in SEQ ID NO:29), and at least 6, 12, 15, 20, 25, 50, 75, 100 or more nucleotides from exon 35 of ROS1 (e.g., from the nucleotide sequence of ROS1 following the fusion junction with MYO5A, e.g., of the ROS1 sequence shown in SEQ ID NO: 1).

[0192] In other embodiments, the nucleic acid molecule includes a nucleotide sequence encoding a MYO5A-ROS1 fusion polypeptide that includes a fragment of a MYO5A gene and a fragment of a ROS1 gene. In one embodiment, the nucleotide sequence encodes a MYO5A-ROS1 fusion polypeptide that includes e.g., a tyrosine kinase domain or a functional fragment thereof. In yet other embodiments, the nucleic acid molecule includes a nucleotide sequence encoding the amino acid sequence (e.g., a fragment of the amino acid sequence) shown in SEQ ID NO:30 and a nucleotide sequence encoding the amino acid sequence (e.g., a fragment of the amino acid sequence) shown in SEQ ID NO:12, or a fragment of the fusion, or a sequence substantially identical thereto. In one embodiment, the encoded MYO5A-ROS1 fusion polypeptide includes a tyrosine kinase domain or a functional fragment thereof.

[0193] In one embodiment, the MYO5A-ROS1 fusion includes the full sequence or a fragment of the nucleotide sequence shown in SEQ ID NO:27 and SEQ ID NO:84, or a nucleotide sequence substantially identical thereto. In another embodiment, the MYO5A-ROS1 fusion polypeptide includes the full sequence or a fragment of the amino acid sequence shown in SEQ ID NO:28 and SEQ ID NO:85, or an amino acid sequence substantially identical thereto, for example at least 70%, 80% 90% identical or even more.

[0194] In a related aspect, the invention features nucleic acid constructs that include the MYO5A-ROS1 nucleic acid molecules described herein. In certain embodiments, the nucleic acid molecules are operatively linked to a native or a heterologous regulatory sequence. Also included are vectors and host cells that include the MYO5A-ROS1 nucleic acid molecules described herein, e.g., vectors and host cells suitable for producing the nucleic acid molecules and polypeptides described herein.

[0195] In a related aspect, methods of producing the nucleic acid molecules and polypeptides described herein are also described.

[0196] In another aspect, the invention features nucleic acid molecules that reduce or inhibit the expression of a nucleic acid molecule that encodes a MYO5A-ROS1 fusion described herein. Examples of such nucleic acid molecules include, for example, antisense molecules, ribozymes, RNAi, triple helix molecules that hybridize to a nucleic acid encoding MYO5A-ROS1, or a transcription regulatory region of MYO5A-ROS1, and blocks or reduces mRNA expression of MYO5A-ROS1.

### Nucleic Acid Detection and Capturing Reagents

[0197] The invention also features a nucleic acid molecule, e.g., nucleic acid fragment, suitable as probe, primer, bait or library member that includes, flanks, hybridizes to, which are useful for identifying, or are otherwise based on, the MYO5A-ROS1 fusions described herein. In certain embodiments, the probe, primer or bait molecule is an oligonucleotide that allows capture, detection or isolation of a MYO5A-ROS1 fusion nucleic acid molecule described herein. The oligonucleotide can comprise a nucleotide sequence substantially complementary to a fragment of the MYO5A-ROS1 fusion nucleic acid molecules described herein. The sequence identity between the nucleic acid fragment, e.g., the oligonucleotide, and the target MYO5A-ROS1 sequence need not be exact, so long as the sequences are sufficiently complementary to allow the capture, detection or isolation of the target sequence. In one embodiment, the nucleic acid fragment is a probe or primer that includes an oligonucleotide between about 5 and 25, e.g., between 10 and 20, or 10 and 15 nucleotides in length. In other embodiments, the nucleic acid fragment is a bait that includes an oligonucleotide between about 100 to 300 nucleotides, 130 and 230 nucleotides, or 150 and 200 nucleotides, in length.

[0198] In one embodiment, the nucleic acid fragment can be used to identify or capture, e.g., by hybridization, a MYO5A-ROS1 fusion. For example, the nucleic acid fragment can be a probe, a primer, or a bait, for use in identifying or capturing, e.g., by hybridization, a MYO5A-ROS1 fusion described herein. In one embodiment, the nucleic acid fragment can be useful for identifying or capturing a MYO5A-ROS1 breakpoint, e.g., the nucleotide sequence of: chromosome 15 at nucleotide plus or minus 10, 20, 30, 40, 50, 60, 80, 100, 150 nucleotides and chromosome 6 at nucleotide plus or minus 10, 20, 30, 40 50, 60, 80, 100, 150 nucleotides.

[0199] In one embodiment, the nucleic acid fragment hybridizes to a nucleotide sequence within a chromosomal rearrangement that creates an in-frame fusion of intron 23 of MYO5A with intron 34 of ROS1. In one embodiment, the nucleic acid fragment hybridizes to a nucleotide sequence in the region In other embodiments, the nucleic acid molecules includes a nucleotide sequence in the region of a nucleotide sequence of chromosome 15 coupled to (e.g., juxtaposed to) nucleotides in the region of a nucleotide sequence Y of chromosome 6. In one embodiment, the nucleic acid fragment hybridizes to a nucleotide sequence that includes a breakpoint, e.g., the nucleotide sequence of: chromosome 15 at nucleotide plus or minus 10, 20, 30, 40 50, 60, 80, 100, 150 or more nucleotides and chromosome 6 at nucleotide plus or minus 10, 20, 30, 40 50, 60, 80, 100, 150 or more nucleotides. For example, the nucleic acid fragment can hybridize to a nucleotide sequence that includes the fusion junction between the MYO5A gene and the ROS1 gene, e.g., a nucleotide sequence that includes a portion of a nucleotide sequence within intron 23 of a MYO5A gene and intron 34 of a ROS1 gene.

[0200] In another embodiment, the nucleic acid fragment hybridizes to a nucleotide sequence that comprises at least 6, 12, 15, 20, 25, 50, 75, 100, 150 or more nucleotides from exon 23 of MYO5A (e.g., from the nucleotide sequence of MYO5A preceding the fusion junction with ROS1, e.g., of the MYO5A sequence shown in SEQ ID NO:29), and at least 6, 12, 15, 20, 25, 50, 75, 100, 150 or more nucleotides from exon 35 of ROS1 (e.g., from the nucleotide sequence of ROS1 following the fusion junction with MYO5A, e.g., of the ROS1 sequence shown in SEQ ID NO: 11).

[0201] The probes or primers described herein can be used, for example, for FISH detection or PCR amplification. In one exemplary embodiment where detection is based on PCR, amplification of the MYO5A-ROS1 fusion junction fusion junction can be performed using a primer or a primer pair, e.g., for amplifying a sequence flanking the fusion junctions described herein, e.g., the mutations or the junction of a chromosomal rearrangement described herein, e.g., MYO5A-ROS1.

[0202] In one embodiment, a pair of isolated oligonucleotide primers can amplify a region containing or adjacent to a position in the MYO5A-ROS1 fusion. For example, forward primers can be designed to hybridize to a nucleotide sequence within MYO5A genomic or mRNA sequence (e.g., a nucleotide sequence within exon 23 of MYO5A of SEQ ID NO:29), and the reverse primers can be designed to hybridize to a nucleotide sequence of ROS1 (e.g., a nucleotide sequence within exon 35 of ROS1, of SEQ ID NO:11).

[0203] In another embodiment, the nucleic acid fragments can be used to identify, e.g., by hybridization, a MYO5A-ROS1 fusion. In one embodiment, the nucleic acid fragment hybridizes to a nucleotide sequence that includes a fusion junction between the MYO5A transcript and the ROS1 transcript.

[0204] In other embodiments, the nucleic acid fragment includes a bait that comprises a nucleotide sequence that hybridizes to a MYO5A-ROS1 fusion nucleic acid molecule described herein, and thereby allows the capture or isolation said nucleic acid molecule. In one embodiment, a bait is suitable for solution phase hybridization. In other embodiments, a bait includes a binding entity, e.g., an affinity tag, that allows capture and separation, e.g., by binding to a binding entity, of a hybrid formed by a bait and a nucleic acid hybridized to the bait.

[0205] In other embodiments, the nucleic acid fragment includes a library member comprising a MYO5A-ROS1 nucleic acid molecule described herein. In one embodiment, the library member includes a rearrangement that results in a MYO5A-ROS1 fusion described herein.

[0206] The nucleic acid fragment can be detectably labeled with, e.g., a radiolabel, a fluorescent label, a bioluminescent label, a chemiluminescent label, an enzyme label, a binding pair label, or can include an affinity tag; a tag, or identifier (e.g., an adaptor, barcode or other sequence identifier).

### MYO5A-ROS1 Fusion Polypeptides

[0207] In another embodiment, the MYO5A-ROS1 fusion comprises an amino acid sequence (e.g., a fragment of the amino acid sequence) shown in SEQ ID NO:30 and an amino acid sequence (e.g., a fragment of the amino acid sequence) shown in SEQ ID NO:12, or a fragment of the fusion. In one embodiment, the MYO5A-ROS1 fusion comprises an amino acid sequence substantially identical to the amino acid sequence (e.g., a fragment of the amino acid sequence) shown in SEQ ID NO:30 and the amino acid sequence (e.g., a fragment of the amino acid sequence) shown in SEQ ID NO:12, or a fragment thereof. In one embodiment, the MYO5A-ROS1 fusion comprises an amino acid sequence at least 70%, at least 75%, at least 80%, at least 85%, at least 90%, at least 95%, at least 99%, at least 99.5 or greater, identical to the amino acid sequence (e.g., a fragment of the amino acid sequence) shown in SEQ ID NO:30 and the amino acid sequence (e.g., a fragment of the amino acid sequence) shown in SEQ ID NO:12. In one embodiment, the MYO5A-ROS1 fusion comprises a sequence containing at least 10, 20, 50, 100, 500, 600, 700, 800, 900, 1000, or more amino acids of the amino acid sequence shown in SEQ ID NO:30 and SEQ ID NO: 12. In one embodiment, the MYO5A-ROS1 fusion comprises an amino acid sequence containing at least 5, 10, 20, 50, 100, 500, 600, 700, 800, 900, 1000, or more contiguous amino acids of the amino acid sequence shown in SEQ ID NO:30 and at least 5, 10, 20, 50, 100, 500, 600, 700, 800, 900, 1000, or more contiguous amino acids of the amino acid sequence shown in SEQ ID NO: 12. In one embodiment, the 5′ MYO5A-3′ ROS1 fusion polypeptide includes a receptor tyrosine kinase domain or a functional fragment thereof. In an embodiment, the 5′MYO5A-3′ROS1 fusion polypeptide comprises sufficient ROS1 and sufficient MYO5A sequence such that it has kinase activity, e.g., has elevated activity. In any event, the fusion causes activation in the cells harboring it of oncogenic signaling pathways.

[0208] In another aspect, the invention features a MYO5A-ROS1 fusion polypeptide (e.g., a purified MYO5A-ROS1 fusion polypeptide), a biologically active or antigenic fragment thereof, as well as reagents (e.g., antibody molecules that bind to a MYO5A-ROS1 fusion polypeptide), methods for modulating a MYO5A-ROS1 polypeptide activity and detection of a MYO5A-ROS1 polypeptide.

[0209] In one embodiment, the MYO5A-ROS1 fusion polypeptide has at least one biological activity. In one embodiment, at least one biological activity of the MYO5A-ROS1 fusion polypeptide is reduced or inhibited by an anti-cancer drug, e.g., a MYO5A inhibitor, a ROS1 inhibitor. In one embodiment, at least one biological activity of the MYO5A-ROS1 fusion polypeptide is reduced or inhibited by a ROS1 inhibitor. In one embodiment, at least one biological activity of the MYO5A-ROS1 fusion polypeptide is reduced or inhibited by a MYO5A inhibitor. In one embodiment, at least one biological activity of the MYO5A-ROS1 fusion polypeptide is reduced or inhibited by a ROS1 inhibitor, e.g., Ganetespib; Crizotinib; TAE684; a dual ALK and ROS1 inhibitor.

[0210] In yet other embodiments, the MYO5A-ROS1 fusion polypeptide is encoded by a nucleic acid molecule described herein. In one embodiment, the MYO5A-ROS1 fusion polypeptide is encoded by an in-frame fusion of intron 23 of MYO5A with intron 34 of ROS1 (e.g., a sequence on chromosome 15 and a sequence on chromosome 6). In another embodiment, the MYO5A-ROS1 fusion polypeptide includes an amino acid sequence encoded by a nucleotide sequence comprising a fusion junction between the MYO5A transcript and the ROS1 transcript.

[0211] In certain embodiments, the MYO5A-ROS1 fusion polypeptide comprises one or more of encoded exons 1-23 from MYO5A and one or more of encoded exons 35-43 of ROS1. In certain embodiments, the MYO5A-ROS1 fusion polypeptide comprises at least 1, 2, 3, 4, 5, 6, 7, 8, 9, 10, 11, 12, 13, 14, 15, 16, 17, 18, 19, 20, 21, 22, 23 or more encoded exons of MYO5A and at least at least 1, 2, 3, 4, 5, 6, 7, 8, 9 or more encoded exons of ROS1. In certain embodiments, the MYO5A-ROS1 fusion polypeptide comprises a fusion of encoded exon 23 from MYO5A and encoded exon 35 from ROS1 (or a fragment thereof). In other embodiments, the fusion comprises at least 1, 2, 3, 4, 5, 6, 7, 8, 9, 10, 11, 12, 13, 14, 15, 16, 17, 18, 19, 20, 21, 22, 23 or more encoded exons of MYO5A; and at least 1, 2, 3, 4, 5, 6, 7, 8, 9 or more encoded exons of ROS1. In certain embodiments, the MYO5A-ROS1 fusion polypeptide comprises encoded exons 1-23 from MYO5A and exons 35-43 of ROS1. In certain embodiments, the 5′ MYO5A-3′ ROS1 fusion polypeptide comprises a fusion junction of the sequence of exon 23 from MYO5A and the sequence of exon 35 from ROS1.

[0212] In certain embodiments, the MYO5A-ROS1 fusion comprises the amino acid sequence corresponding to exon 23 or a fragment thereof from MYO5A, and the amino acid sequence corresponding to exon 35 or a fragment thereof from ROS1 (e.g., as shown in SEQ ID NO:30 and SEQ ID NO:12). In one embodiment, the MYO5A-ROS1 fusion comprises at least 5, 10, 15, 20 or more amino acids from exon 23 of MYO5A (e.g., from the amino acid sequence of MYO5A preceding the fusion junction with ROS1, e.g., of the MYO5A sequence shown in SEQ ID NO:30), and at least 5, 10, 15, 20 or more amino acids from exon 35 of ROS1 (e.g., from the amino acid sequence of ROS1 following the fusion junction with MYO5A, e.g., of the ROS1 sequence shown in SEQ ID NO: 12).

[0213] In one embodiment, the MYO5A-ROS1 fusion polypeptide includes a tyrosine kinase domain or a functional fragment thereof. In a related aspect, the invention features MYO5A-ROS1 fusion polypeptide or fragments operatively linked to heterologous polypeptides to form fusion proteins.

[0214] In another embodiment, the MYO5A-ROS1 fusion polypeptide or fragment is a peptide, e.g., an immunogenic peptide or protein that contains a fusion junction described herein. Such immunogenic peptides or proteins can be used to raise antibodies specific to the fusion protein. In other embodiments, such immunogenic peptides or proteins can be used for vaccine preparation. The vaccine preparation can include other components, e.g., an adjuvant.

[0215] In another aspect, the invention features antibody molecules that bind to a MYO5A-ROS1 fusion polypeptide or fragment described herein. In embodiments, the antibody can distinguish wild type ROS1 (or MYO5A) from MYO5A-ROS1.

### Detection Reagents and Detection of Mutations

[0216] In another aspect, the invention features a detection reagent, e.g., a purified or an isolated preparation thereof. Detection reagents can distinguish a nucleic acid, or protein sequence, having a breakpoint, e.g., a MYO5A-ROS1 breakpoint; from a reference sequence. In one embodiment, the detection reagent detects (e.g., specifically detects) a MYO5A-ROS1 fusion nucleic acid or a polypeptide, e.g., distinguishes a wild type ROS1 or another ROS1 fusion (or MYO5A) from a MYO5A-ROS1 nucleic acid (e.g., as described herein in SEQ ID NO:29 and SEQ ID NO: 11); or a MYO5A-ROS1 polypeptide (e.g., as described herein in SEQ ID NO:30 and SEQ ID NO: 12).

[0217] Detection reagents, e.g., nucleic acid-based detection reagents, can be used to identify mutations in a target nucleic acid. e.g., DNA, e.g., genomic DNA or cDNA, or RNA, e.g., in a sample, e.g., a sample of nucleic acid derived from a neoplastic or tumor cell, e.g., a melanocytic neoplasm, melanoma or metastatic cell. Detection reagents, e.g., antibody-based detection reagents, can be used to identify mutations in a target protein, e.g., in a sample, e.g., a sample of protein derived from, or produced by, a neoplastic or tumor cell, e.g., a melanocytic neoplasm, melanoma or metastatic cell.

### Method of Treatment

[0218] In a related aspect, a method of inhibiting, reducing, or treating a hyperproliferative disorder, e.g., a neoplasm (including benign, pre-malignant or malignant (e.g., a cancer), in a subject is provided. The method includes administering to the subject a preselected therapeutic agent, e.g., an anti-cancer agent (e.g., a kinase inhibitor), as a single agent, or in combination, in an amount sufficient to reduce, inhibit or treat the activity or expression of MYO5A-ROS1 (e.g., a MYO5A-ROS1 fusion described herein), thereby inhibiting, reducing, or treating the hyperproliferative disorder in the subject.

[0219] In one embodiment, the subject treated has a MYO5A-ROS1 fusion; e.g., the subject has a tumor or cancer harboring a MYO5A-ROS1 fusion. In other embodiments, the subject has been previously identified as having a MYO5A-ROS1 fusion. In yet other embodiments, the subject has been previously identified as being likely or unlikely to respond to treatment with a protein kinase inhibitor, e.g., a subject that has previously participated in a clinical trial. In other embodiments, the subject has been previously identified as being likely or unlikely to respond to treatment with a protein kinase inhibitor, based on the presence of the MYO5A-ROS1 fusion. In one embodiment, the subject is a mammal, e.g., a human. In one embodiment, the subject has, or at risk of having a cancer at any stage of disease. In other embodiments, the subject is a patient, e.g., a cancer patient.

[0220] In certain embodiments, the neoplasm or neoplastic cell is a benign, pre-malignant, malignant (cancer) or metastasis. In certain embodiments, the cancer is a solid tumor, a soft tissue tumor, or a metastatic lesion.

[0221] In one embodiment, the neoplasm or neoplastic cell is a benign, pre-malignant, malignant (cancer) or metastasis. In certain embodiments, the cancer is a solid tumor, a soft tissue tumor, or a metastatic lesion. In one embodiment, the cancer is a carcinoma. In one embodiment, the cancer is an adenocarcinoma. In an embodiment, the cancer is a lung adenocarcinoma. In one embodiment, the cancer is chosen from a lung cancer, a pancreatic cancer, melanoma, a colorectal cancer, an esophageal-gastric cancer, a thyroid cancer, or an adenocarcinoma. In one embodiment, the cancer is a lung adenocarcinoma. In other embodiment, the lung cancer is chosen from one or more of the following: non-small cell lung cancer (NSCLC), small cell lung cancer (SCLC), squamous cell carcinoma (SCC), adenocarcinoma of the lung, bronchogenic carcinoma, or a combination thereof. In one embodiment, the lung cancer is NSCLC or SCC.

[0222] In one embodiment, the anti-cancer agent is a ROS1 inhibitor. In one embodiment, the anti-cancer agent is a MYO5A inhibitor. In one embodiment, the anti-cancer agent is a kinase inhibitor. In one embodiment, the anti-cancer agent is a ROS1 inhibitor, e.g., Ganetespib; Crizotinib; TAE684; a dual ALK and ROS1 inhibitor.

### PWWP2A-ROS1 Fusions

[0223] In one embodiment, a fusion includes an in-frame fusion of an exon of PWWP domain containing 2A protein (PWWP2A), e.g., one more exons of PWWP2A (e.g., one or more of exon 1 of PWWP2A) or a fragment thereof, and an exon of C-Ros oncogene 1 (ROS1), e.g., one or more exons of a ROS1 (e.g., one or more of exons 36-43 of ROS1) or a fragment thereof. For example, the PWWP2A-ROS1 fusion can include an in-frame fusion within an intron of PWWP2A (e.g., intron 1) or a fragment thereof, with an intron of ROS1 (e.g., intron 35) or a fragment thereof. In one embodiment, the fusion of the PWWP2A-ROS1 fusion comprises the nucleotide sequence of: chromosome 5 at one or more of a nucleotide (plus or minus 10, 20, 30, 50, 60, 70, 80, 100 or more nucleotides) and chromosome 6 at one or more of a nucleotide (plus or minus 10, 20, 30, 50, 60, 70, 80, 100 or more nucleotides). In one embodiment, the PWWP2A-ROS1 fusion is a translocation, e.g., a translocation of a portion of chromosome 5 and a portion of chromosome 6.

[0224] In certain embodiments, the PWWP2A-ROS1 fusion is in a 5′-PWWP2A to 3′-ROS1 configuration (also referred to herein as “5′-PWWP2A-ROS1-3′).” The term “fusion” or “fusion molecule” can refer to a polypeptide or a nucleic acid fusion, depending on the context. It may include a full-length sequence of a fusion or a fragment thereof, e.g., a fusion junction (e.g., a fragment including a portion of PWWP2A and a portion of ROS1, e.g., a portion of the PWWP2A-ROS1 fusion described herein). In one embodiment, the PWWP2A-ROS1 fusion polypeptide includes a fragment of the amino acid sequence shown in SEQ ID NO:34 and a fragment of the amino acid sequence shown in SEQ ID NO: 12, or an amino acid sequence substantially identical thereto. In another embodiment, the PWWP2A-ROS1 fusion nucleic acid includes a fragment of the nucleotide sequence shown in SEQ ID NO:33 and a fragment of the nucleotide sequence shown in SEQ ID NO: 11, or a nucleotide sequence substantially identical thereto. In one embodiment, the PWWP2A-ROS1 fusion polypeptide comprises sufficient PWWP2A and sufficient ROS1 sequence such that the 5′ PWWP2A-3′ ROS1 fusion has kinase activity, e.g., has elevated activity, e.g., tyrosine kinase activity. In any event, the fusion causes activation in the cells harboring it of oncogenic signaling pathways.

[0225] In certain embodiments, the PWWP2A-ROS1 fusion comprises one or more (or all of) exon 1 from PWWP2A and one or more (or all of) exons 36-43 of ROS1 (e.g., one or more of the exons shown in SEQ ID NO:33 and 112 SEQ ID NO: 11. In another embodiment, the PWWP2A-ROS1 fusion comprises one or more (or all of) exon 1 of PWWP2A and one or more (or all of) exons 36-43 of ROS1. In certain embodiments, the PWWP2A-ROS1 fusion comprises at least 1 or more exons (or encoded exons) from PWWP2A and at least 1, 2, 3, 4, 5, 6, 7, 8 or more exons (or encoded exons) from ROS1 (e.g., from the PWWP2A and ROS1 sequences shown in SEQ ID NO:33 and SEQ ID NO:34 and SEQ ID NO:11 and SEQ ID NO:12.

[0226] In certain embodiments, the PWWP2A-ROS1 fusion comprises exon 1 or a fragment thereof from PWWP2A, and exons 36-43 or a fragment thereof from ROS1 (e.g., as shown in SEQ ID NO:33 and SEQ ID NO:11). In one embodiment, the PWWP2A-ROS1 fusion comprises at least 5, 10, 15, 20, 30, 40, 50 or more amino acids from exon 1 of PWWP2A (e.g., from the amino acid sequence of PWWP2A as shown in SEQ ID NO:34 (e.g., from the amino acid sequence of PWWP2A preceding the fusion junction with ROS1, and at least 5, 10, 15, 20, 30, 40, 50 or more amino acids from exons 36-43 of ROS1 (e.g., from the amino acid sequence of ROS1 as shown in SEQ ID NO:12). In another embodiment, the PWWP2A-ROS1 fusion comprises at least 6, 12, 15, 20, 25, 50, 75, 100 or more nucleotides from exon 1 of PWWP2A (e.g., from the nucleotide sequence of PWWP2A as shown in SEQ ID NO:33 (e.g., from the nucleotide sequence of PWWP2A preceding the fusion junction with ROS1; and at least 6, 12, 15, 20, 25, 50, 75, 100 or more nucleotides from exons 36-43 of ROS1 (e.g., from the nucleotide sequence of ROS1 as shown in SEQ ID NO: 11).

### PWWP2A-ROS1 Nucleic Acid Molecules

[0227] In one aspect, the invention features a nucleic acid molecule (e.g., an isolated or purified) nucleic acid molecule that includes a fragment of a PWWP2A gene and a fragment of a ROS1 gene. In one embodiment, the nucleotide sequence encodes a PWWP2A-ROS1 fusion polypeptide that includes a tyrosine kinase domain or a functional fragment thereof. In another embodiment, the nucleotide sequence encodes a fragment of the ROS1 polypeptide including the amino acid sequence of SEQ ID NO: 12 or a fragment thereof, or a sequence substantially identical thereto. In other embodiments, the nucleic acid molecule includes a fragment of the PWWP2A gene encoding the amino acid sequence of SEQ ID NO:34 or a fragment thereof, or a sequence substantially identical thereto. In yet other embodiments, the nucleic acid molecule includes a nucleotide sequence encoding the amino acid sequence shown in SEQ ID NO:34, or a fragment thereof, and the amino acid sequence shown in SEQ ID NO: 12 or a fragment thereof, or a sequence substantially identical thereto.

[0228] In one embodiment, the nucleic acid molecule includes a fusion, e.g., an in-frame fusion, between an intron of PWWP2A (e.g., intron 1, or a fragment thereof), and an intron of ROS1 (e.g., intron 35, or a fragment thereof). The PWWP2A-ROS1 fusion can comprise a fusion of the nucleotide sequence of: chromosome 5 at one or more of a nucleotide (plus or minus 10, 20, 30, 50, 60, 70, 80, 100 nucleotides) and chromosome 6 at one or more of a nucleotide (plus or minus 10, 20, 30, 50, 60, 70, 80, 100 nucleotides), or a fragment thereof. In one embodiment, the PWWP2A-ROS1 fusion comprises a fusion of the nucleotide sequence of: chromosome 5 at one or more of a nucleotide (plus or minus 10, 20, 30, 50, 60, 70, 80, 100 nucleotides) and chromosome 6 at one or more of a nucleotide (plus or minus 10, 20, 30, 50, 60, 70, 80, 100 nucleotides), or a fragment thereof.

[0229] In another embodiment, the PWWP2A-ROS1 fusion comprises a nucleotide sequence (e.g., a fragment of a nucleotide sequence) shown in SEQ ID NO:33 and a nucleotide sequence (e.g., a fragment of a nucleotide sequence) shown in SEQ ID NO: 11, or a fragment of the fusion. In one embodiment, the PWWP2A-ROS1 fusion comprises a nucleotide sequence substantially identical to the nucleotide sequence (e.g., a fragment of a nucleotide sequence) shown in SEQ ID NO:33 and the nucleotide sequence (e.g., a fragment of a nucleotide sequence) shown SEQ ID NO: 11, or a fragment of the fusion. In one embodiment, the PWWP2A-ROS1 fusion comprises a nucleotide sequence at least 70%, at least 75%, at least 80%, at least 85%, at least 90%, at least 95%, at least 99%, at least 99.5 or greater, identical to the nucleotide sequence (e.g., a fragment of a nucleotide sequence) shown in SEQ ID NO:33 and to the nucleotide sequence (e.g., a fragment of a nucleotide sequence) shown in SEQ ID NO: 11. In one embodiment, the PWWP2A-ROS1 fusion comprises a nucleotide sequence containing at least 25, 50, 100, 150, 200, 500, 1000, 1500, 2000, 2500, 3000, or more nucleotides of the nucleotide sequence shown in SEQ ID NO:33 and a nucleotide sequence containing at least 25, 50, 100, 150, 200, 500, 1000, 1500, 2000, 2500, 3000, or more nucleotides of the nucleotide sequence shown in SEQ ID NO: 11. In one embodiment, the PWWP2A-ROS1 fusion comprises a nucleotide sequence containing at least 25, 50, 100, 150, 200, 500, 1000, 1500, 2000, 2500, 3000, or more contiguous nucleotides of the nucleotide sequence shown in SEQ ID NO:33 and a nucleotide sequence containing at least 25, 50, 100, 150, 200, 500, 1000, 1500, 2000, 2500, 3000, or more nucleotides of the nucleotide sequence shown in SEQ ID NO: 11.

[0230] In another embodiment, the nucleic acid molecule includes a fusion, e.g., an in-frame fusion, of at least 1 or more exons of PWWP2A or a fragment thereof (e.g., one or more of exon 1 of PWWP2A or a fragment thereof), and at least 1, 2, 3, 4, 5, 6, 7, 8 or more exons of ROS1 or a fragment thereof (e.g., one or more of exons 36-43 of ROS1 or a fragment thereof). In yet other embodiments, the nucleic acid molecule includes a fragment the nucleotide sequence shown in SEQ ID NO:33 and a fragment of the nucleotide sequence shown in SEQ ID NO:11 or a fragment of the fusion, or a sequence substantially identical thereto.

[0231] In one embodiment, the nucleic acid molecule is complementary to at least a portion of a nucleotide sequence disclosed herein, e.g., is capable of hybridizing under a stringency condition described herein to SEQ ID NO:33 and/or SEQ ID NO: 11, or a fragment thereof. In yet another embodiment, the nucleic acid molecule hybridizes to a nucleotide sequence that is complementary to at least a portion of a nucleotide sequence disclosed herein, e.g., is capable of hybridizing under a stringency condition to a nucleotide sequence complementary to SEQ ID NO:33 and/or SEQ ID NO: 11, or a fragment thereof. The nucleotide sequence of a cDNA encoding an exemplary 5′ PWWP2A-3′ ROS1 fusion is shown in at least exon 1 (e.g., exon 1) of SEQ ID NO:33 and at least exon 36 (e.g., exons 36-43) of SEQ ID NO: 11, and the predicted amino acid sequence is shown in the corresponding encoded exons of SEQ ID NO: 34 and the corresponding encoded exons of SEQ ID NO: 12, respectively.

[0232] In an embodiment the PWWP2A-ROS1 nucleic acid molecule comprises sufficient PWWP2A and sufficient ROS1 sequence such that the encoded 5′ PWWP2A-3′ ROS1 fusion has kinase activity, e.g., has elevated activity. In certain embodiments, the 5′ PWWP2A-3′ ROS1 fusion comprises exon 1 from PWWP2A and exons 36-43 from ROS1. In certain embodiments, the PWWP2A-ROS1 fusion comprises at least 1 or more exons from PWWP2A and at least at least 1, 2, 3, 4, 5, 6, 7, 8 or more exons of ROS1. In certain embodiments, the PWWP2A-ROS1 fusion comprises a fusion of exon 1 from PWWP2A and exon 36 from ROS1. In another embodiment, the PWWP2A-ROS1 fusion comprises 1 or more exons of PWWP2A; and at least 1, 2, 3, 4, 5, 6, 7, 8 or more exons of ROS1.

[0233] In one embodiment, the nucleic acid molecule includes a nucleotide sequence that has an in-frame fusion of intron 1 of PWWP2A (e.g., NM_{—}052927) with intron 35 of ROS1 (e.g., NM_{—}002944). In another embodiment, the nucleic acid molecule includes a nucleotide sequence that includes a breakpoint. For example, the nucleic acid molecule includes a nucleotide sequence that includes the fusion junction between the PWWP2A gene and the ROS1 gene. e.g., the breakpoint between intron 1 of PWWP2A and intron 35 of ROS1. In other embodiments, the nucleic acid molecules includes a nucleotide sequence of one or more of nucleotide of chromosome 5 coupled to (e.g., directly or indirectly juxtaposed to) one or more of nucleotide of chromosome 6. In one embodiment, the nucleic acid molecule includes the nucleotide sequence of: chromosome 5 at one or more of a nucleotide plus or minus 10, 20, 30, 40 50, 60, 80, 100, 150 nucleotides and chromosome 6 at one or more of a nucleotide plus or minus 10, 20, 30, 40 50, 60, 80, 100, 150 nucleotides (corresponding to the breakpoint of a PWWP2A-ROS1 fusion), or a fragment thereof, or a sequence substantially identical thereto. In one embodiment, the nucleic acid molecule is complementary to at least a portion of a nucleotide sequence disclosed herein, e.g., is capable of hybridizing under a stringency condition described herein to SEQ ID NO:33 and/or SEQ ID NO:11 or a fragment thereof. In yet other embodiment, the nucleic acid molecule hybridizes to a nucleotide sequence that is complementary to at least a portion of a nucleotide sequence disclosed herein, e.g., is capable of hybridizing under a stringency condition described herein to a nucleotide sequence complementary to SEQ ID NO:33 or SEQ ID NO: 11 or a fragment thereof.

[0234] In another embodiment, the PWWP2A-ROS1 fusion nucleic acid comprises at least 6, 12, 15, 20, 25, 50, 75, 100 or more nucleotides from exon 1 of PWWP2A (e.g., from the nucleotide sequence of PWWP2A preceding the fusion junction with ROS1, e.g., of the PWWP2A sequence shown in SEQ ID NO:33), and at least 6, 12, 15, 20, 25, 50, 75, 100 or more nucleotides from exon 36 of ROS1 (e.g., from the nucleotide sequence of ROS1 following the fusion junction with PWWP2A, e.g., of the ROS1 sequence shown in SEQ ID NO: 11).

[0235] In other embodiments, the nucleic acid molecule includes a nucleotide sequence encoding a PWWP2A-ROS1 fusion polypeptide that includes a fragment of a PWWP2A gene and a fragment of a ROS1 gene. In one embodiment, the nucleotide sequence encodes a PWWP2A-ROS1 fusion polypeptide that includes e.g., a tyrosine kinase domain or a functional fragment thereof. In yet other embodiments, the nucleic acid molecule includes a nucleotide sequence encoding the amino acid sequence (e.g., a fragment of the amino acid sequence) shown in SEQ ID NO:34 and a nucleotide sequence encoding the amino acid sequence (e.g., a fragment of the amino acid sequence) shown in SEQ ID NO:12, or a fragment of the fusion, or a sequence substantially identical thereto. In one embodiment, the encoded PWWP2A-ROS1 fusion polypeptide includes a tyrosine kinase domain or a functional fragment thereof.

[0236] In one embodiment, the PWWP2A-ROS1 fusion includes the full sequence or a fragment of the nucleotide sequence shown in SEQ ID NO:31 and SEQ ID NO:90, or a nucleotide sequence substantially identical thereto. In another embodiment, the PWWP2A-ROS1 fusion polypeptide includes the full sequence or a fragment of the amino acid sequence shown in SEQ ID NO:32 and SEQ ID NO:91, or an amino acid sequence substantially identical thereto, for example at least 70% or at least 80% or at least 90% identical or even more.

[0237] In a related aspect, the invention features nucleic acid constructs that include the PWWP2A-ROS1 nucleic acid molecules described herein. In certain embodiments, the nucleic acid molecules are operatively linked to a native or a heterologous regulatory sequence. Also included are vectors and host cells that include the PWWP2A-ROS1 nucleic acid molecules described herein, e.g., vectors and host cells suitable for producing the nucleic acid molecules and polypeptides described herein.

[0238] In a related aspect, methods of producing the nucleic acid molecules and polypeptides described herein are also described.

[0239] In another aspect, the invention features nucleic acid molecules that reduce or inhibit the expression of a nucleic acid molecule that encodes a PWWP2A-ROS1 fusion described herein. Examples of such nucleic acid molecules include, for example, antisense molecules, ribozymes, RNAi, triple helix molecules that hybridize to a nucleic acid encoding PWWP2A-ROS1, or a transcription regulatory region of PWWP2A-ROS1, and blocks or reduces mRNA expression of PWWP2A-ROS1.

### Nucleic Acid Detection and Capturing Reagents

[0240] The invention also features a nucleic acid molecule, e.g., nucleic acid fragment, suitable as probe, primer, bait or library member that includes, flanks, hybridizes to, which are useful for identifying, or are otherwise based on, the PWWP2A-ROS1 fusions described herein. In certain embodiments, the probe, primer or bait molecule is an oligonucleotide that allows capture, detection or isolation of a PWWP2A-ROS1 fusion nucleic acid molecule described herein. The oligonucleotide can comprise a nucleotide sequence substantially complementary to a fragment of the PWWP2A-ROS1 fusion nucleic acid molecules described herein. The sequence identity between the nucleic acid fragment, e.g., the oligonucleotide, and the target PWWP2A-ROS1 sequence need not be exact, so long as the sequences are sufficiently complementary to allow the capture, detection or isolation of the target sequence. In one embodiment, the nucleic acid fragment is a probe or primer that includes an oligonucleotide between about 5 and 25, e.g., between 10 and 20, or 10 and 15 nucleotides in length. In other embodiments, the nucleic acid fragment is a bait that includes an oligonucleotide between about 100 to 300 nucleotides, 130 and 230 nucleotides, or 150 and 200 nucleotides, in length.

[0241] In one embodiment, the nucleic acid fragment can be used to identify or capture, e.g., by hybridization, a PWWP2A-ROS1 fusion. For example, the nucleic acid fragment can be a probe, a primer, or a bait, for use in identifying or capturing, e.g., by hybridization, a PWWP2A-ROS1 fusion described herein. In one embodiment, the nucleic acid fragment can be useful for identifying or capturing a PWWP2A-ROS1 breakpoint, e.g., the nucleotide sequence of: chromosome 5 at nucleotide plus or minus 10, 20, 30, 40, 50, 60, 80, 100, 150 nucleotides and chromosome 6 at nucleotide plus or minus 10, 20, 30, 40, 50, 60, 80, 100, 150 nucleotides.

[0242] In one embodiment, the nucleic acid fragment hybridizes to a nucleotide sequence within a chromosomal rearrangement that creates an in-frame fusion of intron 1 of PWWP2A with intron 35 of ROS1. In one embodiment, the nucleic acid fragment hybridizes to a nucleotide sequence in the region In other embodiments, the nucleic acid molecules includes a nucleotide sequence in the region of a nucleotide sequence of chromosome 5 coupled to (e.g., juxtaposed to) nucleotides in the region of a nucleotide sequence of chromosome 6. In one embodiment, the nucleic acid fragment hybridizes to a nucleotide sequence that includes a breakpoint, e.g., the nucleotide sequence of: chromosome 5 at nucleotide plus or minus 10, 20, 30, 40 50, 60, 80, 100, 150 or more nucleotides and chromosome 6 at nucleotide plus or minus 10, 20, 30, 40 50, 60, 80, 100, 150 or more nucleotides. For example, the nucleic acid fragment can hybridize to a nucleotide sequence that includes the fusion junction between the PWWP2A gene and the ROS1 gene, e.g., a nucleotide sequence that includes a portion of a nucleotide sequence within intron 1 of a PWWP2A gene and intron 35 of a ROS1 gene.

[0243] In another embodiment, the nucleic acid fragment hybridizes to a nucleotide sequence that comprises at least 6, 12, 15, 20, 25, 50, 75, 100, 150 or more nucleotides from exon 1 of PWWP2A (e.g., from the nucleotide sequence of PWWP2A preceding the fusion junction with ROS1, e.g., of the PWWP2A sequence shown in SEQ ID NO:33), and at least 6, 12, 15, 20, 25, 50, 75, 100, 150 or more nucleotides from exon 36 of ROS1 (e.g., from the nucleotide sequence of ROS1 following the fusion junction with PWWP2A, e.g., of the ROS1 sequence shown in SEQ ID NO: 11).

[0244] The probes or primers described herein can be used, for example, for FISH detection or PCR amplification. In one exemplary embodiment where detection is based on PCR, amplification of the PWWP2A-ROS1 fusion junction fusion junction can be performed using a primer or a primer pair, e.g., for amplifying a sequence flanking the fusion junctions described herein, e.g., the mutations or the junction of a chromosomal rearrangement described herein, e.g., PWWP2A-ROS1.

[0245] In one embodiment, a pair of isolated oligonucleotide primers can amplify a region containing or adjacent to a position in the PWWP2A-ROS1 fusion. For example, forward primers can be designed to hybridize to a nucleotide sequence within PWWP2A genomic or mRNA sequence (e.g., a nucleotide sequence within exon 1 of PWWP2A of SEQ ID NO:33, and the reverse primers can be designed to hybridize to a nucleotide sequence of ROS1 (e.g., a nucleotide sequence within exon 36 of ROS1, of SEQ ID NO:11.

[0246] In another embodiment, the nucleic acid fragments can be used to identify, e.g., by hybridization, a PWWP2A-ROS1 fusion. In one embodiment, the nucleic acid fragment hybridizes to a nucleotide sequence that includes a fusion junction between the PWWP2A transcript and the ROS1 transcript.

[0247] In other embodiments, the nucleic acid fragment includes a bait that comprises a nucleotide sequence that hybridizes to a PWWP2A-ROS1 fusion nucleic acid molecule described herein, and thereby allows the capture or isolation said nucleic acid molecule. In one embodiment, a bait is suitable for solution phase hybridization. In other embodiments, a bait includes a binding entity, e.g., an affinity tag, that allows capture and separation, e.g., by binding to a binding entity, of a hybrid formed by a bait and a nucleic acid hybridized to the bait.

[0248] In other embodiments, the nucleic acid fragment includes a library member comprising a PWWP2A-ROS1 nucleic acid molecule described herein. In one embodiment, the library member includes a rearrangement that results in a PWWP2A-ROS1 fusion described herein.

[0249] The nucleic acid fragment can be detectably labeled with, e.g., a radiolabel, a fluorescent label, a bioluminescent label, a chemiluminescent label, an enzyme label, a binding pair label, or can include an affinity tag; a tag, or identifier (e.g., an adaptor, barcode or other sequence identifier).

### PWWP2A-ROS1 Fusion Polypeptides

[0250] In another embodiment, the PWWP2A-ROS1 fusion comprises an amino acid sequence (e.g., a fragment of the amino acid sequence) shown in SEQ ID NO:34 and an amino acid sequence (e.g., a fragment of the amino acid sequence) shown in SEQ ID NO:12, or a fragment of the fusion. In one embodiment, the PWWP2A-ROS1 fusion comprises an amino acid sequence substantially identical to the amino acid sequence (e.g., a fragment of the amino acid sequence) shown in SEQ ID NO:34 and the amino acid sequence (e.g., a fragment of the amino acid sequence) shown in SEQ ID NO: 12, or a fragment thereof. In one embodiment, the PWWP2A-ROS1 fusion comprises an amino acid sequence at least 70%, at least 75%, at least 80%, at least 85%, at least 90%, at least 95%, at least 99%, at least 99.5 or greater, identical to the amino acid sequence (e.g., a fragment of the amino acid sequence) shown in SEQ ID NO:34 and the amino acid sequence (e.g., a fragment of the amino acid sequence) shown in SEQ ID NO:12. In one embodiment, the PWWP2A-ROS1 fusion comprises a sequence containing at least 10, 20, 50, 100, 500, 600, 700, 800, 900, 1000, or more amino acids of the amino acid sequence shown in SEQ ID NO:34 and SEQ ID NO: 12. In one embodiment, the PWWP2A-ROS1 fusion comprises an amino acid sequence containing at least 5, 10, 20, 50, 100, 500, 600, 700, 800, 900, 1000, or more contiguous amino acids of the amino acid sequence shown in SEQ ID NO:34 and at least 5, 10, 20, 50, 100, 500, 600, 700, 800, 900, 1000, or more contiguous amino acids of the amino acid sequence shown in SEQ ID NO: 12. In one embodiment, the 5′ PWWP2A-3′ ROS1 fusion polypeptide includes a receptor tyrosine kinase domain or a functional fragment thereof. In an embodiment, the 5′PWWP2A-3′ROS1 fusion polypeptide comprises sufficient ROS1 and sufficient PWWP2A sequence such that it has kinase activity, e.g., has elevated activity as stated above.

[0251] In another aspect, the invention features a PWWP2A-ROS1 fusion polypeptide (e.g., a purified PWWP2A-ROS1 fusion polypeptide), a biologically active or antigenic fragment thereof, as well as reagents (e.g., antibody molecules that bind to a PWWP2A-ROS1 fusion polypeptide), methods for modulating a PWWP2A-ROS1 polypeptide activity and detection of a PWWP2A-ROS1 polypeptide.

[0252] In one embodiment, the PWWP2A-ROS1 fusion polypeptide has at least one biological activity. In one embodiment, at least one biological activity of the PWWP2A-ROS1 fusion polypeptide is reduced or inhibited by an anti-cancer drug, e.g., a PWWP2A inhibitor, a ROS1 inhibitor. In one embodiment, at least one biological activity of the PWWP2A-ROS1 fusion polypeptide is reduced or inhibited by a ROS1 inhibitor. In one embodiment, at least one biological activity of the PWWP2A-ROS1 fusion polypeptide is reduced or inhibited by a PWWP2A inhibitor. In one embodiment, at least one biological activity of the PWWP2A-ROS1 fusion polypeptide is reduced or inhibited by a ROS1 inhibitor, e.g., Ganetespib; Crizotinib; TAE684; a dual ALK and ROS1 inhibitor.

[0253] In yet other embodiments, the PWWP2A-ROS1 fusion polypeptide is encoded by a nucleic acid molecule described herein. In one embodiment, the PWWP2A-ROS1 fusion polypeptide is encoded by an in-frame fusion of intron 1 of PWWP2A with intron 35 of ROS1 (e.g., a sequence on chromosome 5 and a sequence on chromosome 6). In another embodiment, the PWWP2A-ROS1 fusion polypeptide includes an amino acid sequence encoded by a nucleotide sequence comprising a fusion junction between the PWWP2A transcript and the ROS1 transcript.

[0254] In certain embodiments, the PWWP2A-ROS1 fusion polypeptide comprises one or more of encoded exon 1 from PWWP2A and one or more of encoded exons 36-43 of ROS1. In certain embodiments, the PWWP2A-ROS1 fusion polypeptide comprises at least 1 or more encoded exons of PWWP2A and at least at least 1, 2, 3, 4, 5, 6, 7, 8 or more encoded exons of ROS1. In certain embodiments, the PWWP2A-ROS1 fusion polypeptide comprises a fusion of encoded exon 1 from PWWP2A and encoded exon 36 from ROS1 (or a fragment thereof). In other embodiments, the fusion comprises at least 1 or more encoded exons of PWWP2A; and at least 1, 2, 3, 4, 5, 6, 7, 8 or more encoded exons of ROS1. In certain embodiments, the PWWP2A-ROS1 fusion polypeptide comprises encoded exon 1 from PWWP2A and exons 36-43 of ROS1. In certain embodiments, the 5′ PWWP2A-3′ ROS1 fusion polypeptide comprises a fusion junction of the sequence of exon 1 from PWWP2A and the sequence of exon 36 from ROS1.

[0255] In certain embodiments, the PWWP2A-ROS1 fusion comprises the amino acid sequence corresponding to exon 1 or a fragment thereof from PWWP2A, and the amino acid sequence corresponding to exon 36 or a fragment thereof from ROS1 (e.g., as shown in SEQ ID NO:34 and SEQ ID NO:12). In one embodiment, the PWWP2A-ROS1 fusion comprises at least 5, 10, 15, 20 or more amino acids from exon 1 of PWWP2A (e.g., from the amino acid sequence of PWWP2A preceding the fusion junction with ROS1, e.g., of the PWWP2A sequence shown in SEQ ID NO:34), and at least 5, 10, 15, 20 or more amino acids from exon 36 of ROS1 (e.g., from the amino acid sequence of ROS1 following the fusion junction with PWWP2A, e.g., of the ROS1 sequence shown in SEQ ID NO: 12).

[0256] In one embodiment, the PWWP2A-ROS1 fusion polypeptide includes a tyrosine kinase domain or a functional fragment thereof. In a related aspect, the invention features PWWP2A-ROS1 fusion polypeptide or fragments operatively linked to heterologous polypeptides to form fusion proteins.

[0257] In another embodiment, the PWWP2A-ROS1 fusion polypeptide or fragment is a peptide, e.g., an immunogenic peptide or protein. Such a peptide or protein contains a fusion junction described herein. Such immunogenic peptides or proteins can be used to raise antibodies specific to the fusion protein. In other embodiments, such immunogenic peptides or proteins can be used for vaccine preparation. The vaccine preparation can include other components, e.g., an adjuvant.

[0258] In another aspect, the invention features antibody molecules that bind to a PWWP2A-ROS1 fusion polypeptide or fragment described herein. In embodiments, the antibody can distinguish wild type ROS1 (or PWWP2A) from PWWP2A-ROS1.

### Detection Reagents and Detection of Mutations

[0259] In another aspect, the invention features a detection reagent, e.g., a purified or an isolated preparation thereof. Detection reagents can distinguish a nucleic acid, or protein sequence, having a breakpoint, e.g., a PWWP2A-ROS1 breakpoint; from a reference sequence. In one embodiment, the detection reagent detects (e.g., specifically detects) a PWWP2A-ROS1 fusion nucleic acid or a polypeptide, e.g., distinguishes a wild type ROS1 or another ROS1 fusion (or PWWP2A) from a PWWP2A-ROS1 nucleic acid (e.g., as described herein in SEQ ID NO:33 and SEQ ID NO:11); or a PWWP2A-ROS1 polypeptide (e.g., as described herein in SEQ ID NO:34 and SEQ ID NO:12).

[0260] Detection reagents, e.g., nucleic acid-based detection reagents, can be used to identify mutations in a target nucleic acid. e.g., DNA, e.g., genomic DNA or cDNA, or RNA, e.g., in a sample, e.g., a sample of nucleic acid derived from a neoplastic or tumor cell, e.g., a melanocytic neoplasm, melanoma or metastatic cell. Detection reagents, e.g., antibody-based detection reagents, can be used to identify mutations in a target protein, e.g., in a sample, e.g., a sample of protein derived from, or produced by, a neoplastic or tumor cell, e.g., a melanocytic neoplasm, melanoma or metastatic cell.

### Method of Treatment

[0261] In a related aspect, a method of inhibiting, reducing, or treating a hyperproliferative disorder, e.g., a neoplasm (including benign, pre-malignant or malignant (e.g., a cancer), in a subject is provided. The method includes administering to the subject a preselected therapeutic agent, e.g., an anti-cancer agent (e.g., a kinase inhibitor), as a single agent, or in combination, in an amount sufficient to reduce, inhibit or treat the activity or expression of PWWP2A-ROS1 (e.g., a PWWP2A-ROS1 fusion described herein), thereby inhibiting, reducing, or treating the hyperproliferative disorder in the subject.

[0262] In one embodiment, the subject treated has a PWWP2A-ROS1 fusion; e.g., the subject has a tumor or cancer harboring a PWWP2A-ROS1 fusion. In other embodiments, the subject has been previously identified as having a PWWP2A-ROS1 fusion. In yet other embodiments, the subject has been previously identified as being likely or unlikely to respond to treatment with a protein kinase inhibitor, e.g., a subject that has previously participated in a clinical trial. In other embodiments, the subject has been previously identified as being likely or unlikely to respond to treatment with a protein kinase inhibitor, based on the presence of the PWWP2A-ROS1 fusion. In one embodiment, the subject is a mammal, e.g., a human. In one embodiment, the subject has, or at risk of having a cancer at any stage of disease. In other embodiments, the subject is a patient, e.g., a cancer patient.

[0263] In certain embodiments, the neoplasm or neoplastic cell is a benign, pre-malignant, malignant (cancer) or metastasis. In certain embodiments, the cancer is a solid tumor, a soft tissue tumor, or a metastatic lesion.

[0264] In one embodiment, the neoplasm or neoplastic cell is a benign, pre-malignant, malignant (cancer) or metastasis. In certain embodiments, the cancer is a solid tumor, a soft tissue tumor, or a metastatic lesion. In one embodiment, the cancer is a carcinoma. In one embodiment, the cancer is an adenocarcinoma. In an embodiment, the cancer is a lung adenocarcinoma. In one embodiment, the cancer is chosen from a lung cancer, a pancreatic cancer, melanoma, a colorectal cancer, an esophageal-gastric cancer, a thyroid cancer, or an adenocarcinoma. In one embodiment, the cancer is a lung adenocarcinoma. In other embodiment, the lung cancer is chosen from one or more of the following: non-small cell lung cancer (NSCLC), small cell lung cancer (SCLC), squamous cell carcinoma (SCC), adenocarcinoma of the lung, bronchogenic carcinoma, or a combination thereof. In one embodiment, the lung cancer is NSCLC or SCC.

[0265] In one embodiment, the anti-cancer agent is a ROS1 inhibitor. In one embodiment, the anti-cancer agent is a PWWP2A inhibitor. In one embodiment, the anti-cancer agent is a kinase inhibitor. In one embodiment, the anti-cancer agent is a ROS1 inhibitor, e.g., Ganetespib; Crizotinib; TAE684; a dual ALK and ROS1 inhibitor.

### TPM3-ALK Fusions

[0266] In one embodiment, a fusion includes an in-frame fusion of an exon of tropomyosin 3 (TPM3), e.g., one more exons of TPM3 (e.g., one or more of exons 1-8 of TPM3) or a fragment thereof, and an exon of anaplastic lymphoma receptor tyrosine kinase (ALK), e.g., one or more exons of an ALK (e.g., one or more of exons 20-29 of ALK) or a fragment thereof. For example, the TPM3-ALK fusion can include an in-frame fusion within an intron of TPM3 (e.g., intron 8) or a fragment thereof, with an intron of ALK (e.g., intron 19) or a fragment thereof. In one embodiment, the fusion of the TPM3-ALK fusion comprises the nucleotide sequence of: chromosome 1 at one or more of a nucleotide (plus or minus 10, 20, 30, 50, 60, 70, 80, 100 or more nucleotides) and chromosome 2 at one or more of a nucleotide (plus or minus 10, 20, 30, 50, 60, 70, 80, 100 or more nucleotides). In one embodiment, the TPM3-ALK fusion is a translocation, e.g., a translocation of a portion of chromosome 1 and a portion of chromosome 2.

[0267] In certain embodiments, the TPM3-ALK fusion is in a 5′-TPM3 to 3′-ALK configuration (also referred to herein as “5′-TPM3-ALK-3′).” The term “fusion” or “fusion molecule” can refer to a polypeptide or a nucleic acid fusion, depending on the context. It may include a full-length sequence of a fusion or a fragment thereof, e.g., a fusion junction (e.g., a fragment including a portion of TPM3 and a portion of ALK, e.g., a portion of the TPM3-ALK fusion described herein). In one embodiment, the TPM3-ALK fusion polypeptide includes a fragment of the amino acid sequence shown in SEQ ID NO:10 and a fragment of the amino acid sequence shown in SEQ ID NO:7, or an amino acid sequence substantially identical thereto. In another embodiment, the TPM3-ALK fusion nucleic acid includes a fragment of the nucleotide sequence shown in SEQ ID NO:9 and a fragment of the nucleotide sequence shown in SEQ ID NO:7, or a nucleotide sequence substantially identical thereto. In one embodiment, the TPM3-ALK fusion polypeptide comprises sufficient TPM3 and sufficient ALK sequence such that the 5′ TPM3-3′ ALK fusion has kinase activity, e.g., has elevated activity, e.g., tyrosine kinase activity. In any event, the fusion causes activation in the cells harboring it of oncogenic signaling pathways.

[0268] In certain embodiments, the TPM3-ALK fusion comprises one or more (or all of) exons 1-8 from TPM3 and one or more (or all of) exons 20-29 of ALK (e.g., one or more of the exons shown in SEQ ID NO:9 and SEQ ID NO:7. In another embodiment, the TPM3-ALK fusion comprises one or more (or all of) exons 1-8 of TPM3 and one or more (or all of) exons 20-29 of ALK. In certain embodiments, the TPM3-ALK fusion comprises at least 1, 2, 3, 4, 5, 6, 7, 8 or more exons (or encoded exons) from TPM3 and at least 1, 2, 3, 4, 5, 6, 7, 8, 4, 5, 6, 7, 8, 9, 10 or more exons (or encoded exons) from ALK (e.g., from the TPM3 and ALK sequences shown in SEQ ID NO:9 and SEQ ID NO:10 and SEQ ID NO:7 and SEQ ID NO:8.

[0269] In certain embodiments, the TPM3-ALK fusion comprises exons 1-8 or a fragment thereof from TPM3, and exons 20-29 or a fragment thereof from ALK (e.g., as shown in SEQ ID NO:9 and SEQ ID NO:7). In one embodiment, the TPM3-ALK fusion comprises at least 5, 10, 15, 20, 30, 40, 50 or more amino acids from exons 1-8 of TPM3 (e.g., from the amino acid sequence of TPM3 as shown in SEQ ID NO:10 (e.g., from the amino acid sequence of TPM3 preceding the fusion junction with ALK, and at least 5, 10, 15, 20, 30, 40, 50 or more amino acids from exons 20-29 of ALK (e.g., from the amino acid sequence of ALK as shown in SEQ ID NO:7). In another embodiment, the TPM3-ALK fusion comprises at least 6, 12, 15, 20, 25, 50, 75, 100 or more nucleotides from exons 1-8 of TPM3 (e.g., from the nucleotide sequence of TPM3 as shown in SEQ ID NO:9 (e.g., from the nucleotide sequence of TPM3 preceding the fusion junction with ALK); and at least 6, 12, 15, 20, 25, 50, 75, 100 or more nucleotides from exons 20-29 of ALK (e.g., from the nucleotide sequence of ALK as shown in SEQ ID NO:7).

[0270] In one embodiment, the TPM3-ALK fusion includes the full sequence or a fragment of the nucleotide sequence shown in SEQ ID NO:43 and SEQ ID NO:98, or a nucleotide sequence substantially identical thereto. In another embodiment, the TPM3-ALK fusion polypeptide includes the full sequence or a fragment of the amino acid sequence shown in SEQ ID NO:44 and SEQ ID NO:99, or an amino acid sequence substantially identical thereto, for example at least 70%, or at least 805 or at least 90% identical or even more.

### TPM3-ALK Nucleic Acid Molecules

[0271] In one aspect, the invention features a nucleic acid molecule (e.g., an isolated or purified) nucleic acid molecule that includes a fragment of a TPM3 gene and a fragment of an ALK gene. In one embodiment, the nucleotide sequence encodes a TPM3-ALK fusion polypeptide that includes a tyrosine kinase domain or a functional fragment thereof. In another embodiment, the nucleotide sequence encodes a fragment of the ALK polypeptide including the amino acid sequence of SEQ ID NO:7 or a fragment thereof, or a sequence substantially identical thereto. In other embodiments, the nucleic acid molecule includes a fragment of the TPM3 gene encoding the amino acid sequence of SEQ ID NO:10 or a fragment thereof, or a sequence substantially identical thereto. In yet other embodiments, the nucleic acid molecule includes a nucleotide sequence encoding the amino acid sequence shown in SEQ ID NO:10, or a fragment thereof, and the amino acid sequence shown in SEQ ID NO:7 or a fragment thereof, or a sequence substantially identical thereto.

[0272] In one embodiment, the nucleic acid molecule includes a fusion, e.g., an in-frame fusion, between an intron of TPM3 (e.g., intron 8, or a fragment thereof), and an intron of ALK (e.g., intron 19, or a fragment thereof). The TPM3-ALK fusion can comprise a fusion of the nucleotide sequence of: chromosome 1 at one or more of a nucleotide (plus or minus 10, 20, 30, 50, 60, 70, 80, 100 nucleotides) and chromosome 2 at one or more of a nucleotide (plus or minus 10, 20, 30, 50, 60, 70, 80, 100 nucleotides), or a fragment thereof. In one embodiment, the TPM3-ALK fusion comprises a fusion of the nucleotide sequence of: chromosome 1 at one or more of a nucleotide (plus or minus 10, 20, 30, 50, 60, 70, 80, 100 nucleotides) and chromosome 2 at one or more of a nucleotide (plus or minus 10, 20, 30, 50, 60, 70, 80, 100 nucleotides), or a fragment thereof.

[0273] In another embodiment, the TPM3-ALK fusion comprises a nucleotide sequence (e.g., a fragment of a nucleotide sequence) shown in SEQ ID NO:9 and a nucleotide sequence (e.g., a fragment of a nucleotide sequence) shown in SEQ ID NO:7, or a fragment of the fusion. In one embodiment, the TPM3-ALK fusion comprises a nucleotide sequence substantially identical to the nucleotide sequence (e.g., a fragment of a nucleotide sequence) shown in SEQ ID NO:9 and the nucleotide sequence (e.g., a fragment of a nucleotide sequence) shown SEQ ID NO:7, or a fragment of the fusion. In one embodiment, the TPM3-ALK fusion comprises a nucleotide sequence at least 70%, at least 75%, at least 80%, at least 85%, at least 90%, at least 95%, at least 99%, at least 99.5 or greater, identical to the nucleotide sequence (e.g., a fragment of a nucleotide sequence) shown in SEQ ID NO:9 and to the nucleotide sequence (e.g., a fragment of a nucleotide sequence) shown in SEQ ID NO:7. In one embodiment, the TPM3-ALK fusion comprises a nucleotide sequence containing at least 25, 50, 100, 150, 200, 500, 1000, 1500, 2000, 2500, 3000, or more nucleotides of the nucleotide sequence shown in SEQ ID NO:9 and a nucleotide sequence containing at least 25, 50, 100, 150, 200, 500, 1000, 1500, 2000, 2500, 3000, or more nucleotides of the nucleotide sequence shown in SEQ ID NO:7. In one embodiment, the TPM3-ALK fusion comprises a nucleotide sequence containing at least 25, 50, 100, 150, 200, 500, 1000, 1500, 2000, 2500, 3000, or more contiguous nucleotides of the nucleotide sequence shown in SEQ ID NO:9 and a nucleotide sequence containing at least 25, 50, 100, 150, 200, 500, 1000, 1500, 2000, 2500, 3000, or more nucleotides of the nucleotide sequence shown in SEQ ID NO:7.

[0274] In another embodiment, the nucleic acid molecule includes a fusion, e.g., an in-frame fusion, of at least 1, 2, 3, 4, 5, 6, 7, 8 or more exons of TPM3 or a fragment thereof (e.g., one or more of exons 1-8 of TPM3 or a fragment thereof), and at least 1, 2, 3, 4, 5, 6, 7, 8, 4, 5, 6, 7, 8, 9, 10 or more exons of ALK or a fragment thereof (e.g., one or more of exons 20-29 of ALK or a fragment thereof). In yet other embodiments, the nucleic acid molecule includes a fragment the nucleotide sequence shown in SEQ ID NO:9 and a fragment of the nucleotide sequence shown in SEQ ID NO:7 or a fragment of the fusion, or a sequence substantially identical thereto.

[0275] In one embodiment, the nucleic acid molecule is complementary to at least a portion of a nucleotide sequence disclosed herein, e.g., is capable of hybridizing under a stringency condition described herein to SEQ ID NO:9 and/or SEQ ID NO:7, or a fragment thereof. In yet another embodiment, the nucleic acid molecule hybridizes to a nucleotide sequence that is complementary to at least a portion of a nucleotide sequence disclosed herein, e.g., is capable of hybridizing under a stringency condition to a nucleotide sequence complementary to SEQ ID NO:9 and/or SEQ ID NO:7, or a fragment thereof. The nucleotide sequence of a cDNA encoding an exemplary 5′ TPM3-3′ ALK fusion is shown in at least exon 8 (e.g., exons 1-8) of SEQ ID NO:9 and at least exon 20 (e.g., exons 20-29) of SEQ ID NO:7, and the predicted amino acid sequence is shown in the corresponding encoded exons of SEQ ID NO: 10 and the corresponding encoded exons of SEQ ID NO:7, respectively.

[0276] In an embodiment the TPM3-ALK nucleic acid molecule comprises sufficient TPM3 and sufficient ALK sequence such that the encoded 5′ TPM3-3′ ALK fusion has kinase activity, e.g., has elevated activity. In any event, the fusion causes activation in the cells harboring it of oncogenic signaling pathways. In certain embodiments, the 5′ TPM3-3′ ALK fusion comprises exons 1-8 from TPM3 and exons 20-29 from ALK. In certain embodiments, the TPM3-ALK fusion comprises at least 1, 2, 3, 4, 5, 6, 7, 8 or more exons from TPM3 and at least at least 1, 2, 3, 4, 5, 6, 7, 8, 4, 5, 6, 7, 8, 9, 10 or more exons of ALK. In certain embodiments, the TPM3-ALK fusion comprises a fusion of exon 8 from TPM3 and exon 20 from ALK. In another embodiment, the TPM3-ALK fusion comprises 1, 2, 3, 4, 5, 6, 7, 8 or more exons of TPM3; and at least 1, 2, 3, 4, 5, 6, 7, 8, 4, 5, 6, 7, 8, 9, 10 or more exons of ALK.

[0277] In one embodiment, the nucleic acid molecule includes a nucleotide sequence that has an in-frame fusion of intron 8 of TPM3 (e.g., NM_{—}152263) with intron 19 of ALK (e.g., NM_{—}004304). In another embodiment, the nucleic acid molecule includes a nucleotide sequence that includes a breakpoint. For example, the nucleic acid molecule includes a nucleotide sequence that includes the fusion junction between the TPM3 gene and the ALK gene, e.g., the breakpoint between intron 8 of TPM3 and intron 19 of ALK. In other embodiments, the nucleic acid molecules includes a nucleotide sequence of one or more of nucleotide of chromosome 1 coupled to (e.g., directly or indirectly juxtaposed to) one or more of nucleotide of chromosome 2. In one embodiment, the nucleic acid molecule includes the nucleotide sequence of: chromosome 1 at one or more of a nucleotide plus or minus 10, 20, 30, 40 50, 60, 80, 100, 150 nucleotides and chromosome 2 at one or more of a nucleotide plus or minus 10, 20, 30, 40 50, 60, 80, 100, 150 nucleotides (corresponding to the breakpoint of a TPM3-ALK fusion), or a fragment thereof, or a sequence substantially identical thereto. In one embodiment, the nucleic acid molecule is complementary to at least a portion of a nucleotide sequence disclosed herein, e.g., is capable of hybridizing under a stringency condition described herein to SEQ ID NO:9 and/or SEQ ID NO:7 or a fragment thereof. In yet other embodiment, the nucleic acid molecule hybridizes to a nucleotide sequence that is complementary to at least a portion of a nucleotide sequence disclosed herein, e.g., is capable of hybridizing under a stringency condition described herein to a nucleotide sequence complementary to SEQ ID NO:9 or SEQ ID NO:7 or a fragment thereof.

[0278] In another embodiment, the TPM3-ALK fusion nucleic acid comprises at least 6, 12, 15, 20, 25, 50, 75, 100 or more nucleotides from exon 8 of TPM3 (e.g., from the nucleotide sequence of TPM3 preceding the fusion junction with ALK, e.g., of the TPM3 sequence shown in SEQ ID NO:9), and at least 6, 12, 15, 20, 25, 50, 75, 100 or more nucleotides from exon 20 of ALK (e.g., from the nucleotide sequence of ALK following the fusion junction with TPM3, e.g., of the ALK sequence shown in SEQ ID NO:7).

[0279] In other embodiments, the nucleic acid molecule includes a nucleotide sequence encoding a TPM3-ALK fusion polypeptide that includes a fragment of a TPM3 gene and a fragment of an ALK gene. In one embodiment, the nucleotide sequence encodes a TPM3-ALK fusion polypeptide that includes e.g., a tyrosine kinase domain or a functional fragment thereof. In yet other embodiments, the nucleic acid molecule includes a nucleotide sequence encoding the amino acid sequence (e.g., a fragment of the amino acid sequence) shown in SEQ ID NO: 10 and a nucleotide sequence encoding the amino acid sequence (e.g., a fragment of the amino acid sequence) shown in SEQ ID NO:7, or a fragment of the fusion, or a sequence substantially identical thereto. In one embodiment, the encoded TPM3-ALK fusion polypeptide includes a tyrosine kinase domain or a functional fragment thereof.

[0280] In a related aspect, the invention features nucleic acid constructs that include the TPM3-ALK nucleic acid molecules described herein. In certain embodiments, the nucleic acid molecules are operatively linked to a native or a heterologous regulatory sequence. Also included are vectors and host cells that include the TPM3-ALK nucleic acid molecules described herein, e.g., vectors and host cells suitable for producing the nucleic acid molecules and polypeptides described herein.

[0281] In a related aspect, methods of producing the nucleic acid molecules and polypeptides described herein are also described.

[0282] In another aspect, the invention features nucleic acid molecules that reduce or inhibit the expression of a nucleic acid molecule that encodes a TPM3-ALK fusion described herein. Examples of such nucleic acid molecules include, for example, antisense molecules, ribozymes, RNAi, triple helix molecules that hybridize to a nucleic acid encoding TPM3-ALK, or a transcription regulatory region of TPM3-ALK, and blocks or reduces mRNA expression of TPM3-ALK.

### Nucleic Acid Detection and Capturing Reagents

[0283] The invention also features a nucleic acid molecule, e.g., nucleic acid fragment, suitable as probe, primer, bait or library member that includes, flanks, hybridizes to, which are useful for identifying, or are otherwise based on, the TPM3-ALK fusions described herein. In certain embodiments, the probe, primer or bait molecule is an oligonucleotide that allows capture, detection or isolation of a TPM3-ALK fusion nucleic acid molecule described herein. The oligonucleotide can comprise a nucleotide sequence substantially complementary to a fragment of the TPM3-ALK fusion nucleic acid molecules described herein. The sequence identity between the nucleic acid fragment, e.g., the oligonucleotide, and the target TPM3-ALK sequence need not be exact, so long as the sequences are sufficiently complementary to allow the capture, detection or isolation of the target sequence. In one embodiment, the nucleic acid fragment is a probe or primer that includes an oligonucleotide between about 5 and 25, e.g., between 10 and 20, or 10 and 15 nucleotides in length. In other embodiments, the nucleic acid fragment is a bait that includes an oligonucleotide between about 100 to 300 nucleotides, 130 and 230 nucleotides, or 150 and 200 nucleotides, in length.

[0284] In one embodiment, the nucleic acid fragment can be used to identify or capture, e.g., by hybridization, a TPM3-ALK fusion. For example, the nucleic acid fragment can be a probe, a primer, or a bait, for use in identifying or capturing, e.g., by hybridization, a TPM3-ALK fusion described herein. In one embodiment, the nucleic acid fragment can be useful for identifying or capturing a TPM3-ALK breakpoint, e.g., the nucleotide sequence of: chromosome 1 at nucleotide plus or minus 10, 20, 30, 40, 50, 60, 80, 100, 150 nucleotides and chromosome 2 at nucleotide plus or minus 10, 20, 30, 40 50, 60, 80, 100, 150 nucleotides.

[0285] In one embodiment, the nucleic acid fragment hybridizes to a nucleotide sequence within a chromosomal rearrangement that creates an in-frame fusion of intron 8 of TPM3 with intron 19 of ALK. In one embodiment, the nucleic acid fragment hybridizes to a nucleotide sequence in the region In other embodiments, the nucleic acid molecules includes a nucleotide sequence in the region of a nucleotide sequence of chromosome 1 coupled to (e.g., juxtaposed to) nucleotides in the region of a nucleotide sequence of chromosome 2. In one embodiment, the nucleic acid fragment hybridizes to a nucleotide sequence that includes a breakpoint, e.g., the nucleotide sequence of: chromosome 1 at nucleotide plus or minus 10, 20, 30, 40 50, 60, 80, 100, 150 or more nucleotides and chromosome 2 at nucleotide plus or minus 10, 20, 30, 40 50, 60, 80, 100, 150 or more nucleotides. For example, the nucleic acid fragment can hybridize to a nucleotide sequence that includes the fusion junction between the TPM3 gene and the ALK gene, e.g., a nucleotide sequence that includes a portion of a nucleotide sequence within intron 8 of a TPM3 gene and intron 19 of an ALK gene.

[0286] In another embodiment, the nucleic acid fragment hybridizes to a nucleotide sequence that comprises at least 6, 12, 15, 20, 25, 50, 75, 100, 150 or more nucleotides from exon 8 of TPM3 (e.g., from the nucleotide sequence of TPM3 preceding the fusion junction with ALK, e.g., of the TPM3 sequence shown in SEQ ID NO:9), and at least 6, 12, 15, 20, 25, 50, 75, 100, 150 or more nucleotides from exon 20 of ALK (e.g., from the nucleotide sequence of ALK following the fusion junction with TPM3, e.g., of the ALK sequence shown in SEQ ID NO:7).

[0287] The probes or primers described herein can be used, for example, for FISH detection or PCR amplification. In one exemplary embodiment where detection is based on PCR, amplification of the TPM3-ALK fusion junction fusion junction can be performed using a primer or a primer pair, e.g., for amplifying a sequence flanking the fusion junctions described herein, e.g., the mutations or the junction of a chromosomal rearrangement described herein, e.g., TPM3-ALK.

[0288] In one embodiment, a pair of isolated oligonucleotide primers can amplify a region containing or adjacent to a position in the TPM3-ALK fusion. For example, forward primers can be designed to hybridize to a nucleotide sequence within TPM3 genomic or mRNA sequence (e.g., a nucleotide sequence within exon 8 of TPM3 of SEQ ID NO:9), and the reverse primers can be designed to hybridize to a nucleotide sequence of ALK (e.g., a nucleotide sequence within exon 20 of ALK, of SEQ ID NO:7).

[0289] In another embodiment, the nucleic acid fragments can be used to identify, e.g., by hybridization, a TPM3-ALK fusion. In one embodiment, the nucleic acid fragment hybridizes to a nucleotide sequence that includes a fusion junction between the TPM3 transcript and the ALK transcript.

[0290] In other embodiments, the nucleic acid fragment includes a bait that comprises a nucleotide sequence that hybridizes to a TPM3-ALK fusion nucleic acid molecule described herein, and thereby allows the capture or isolation said nucleic acid molecule. In one embodiment, a bait is suitable for solution phase hybridization. In other embodiments, a bait includes a binding entity, e.g., an affinity tag, that allows capture and separation, e.g., by binding to a binding entity, of a hybrid formed by a bait and a nucleic acid hybridized to the bait.

[0291] In other embodiments, the nucleic acid fragment includes a library member comprising a TPM3-ALK nucleic acid molecule described herein. In one embodiment, the library member includes a rearrangement that results in a TPM3-ALK fusion described herein.

[0292] The nucleic acid fragment can be detectably labeled with, e.g., a radiolabel, a fluorescent label, a bioluminescent label, a chemiluminescent label, an enzyme label, a binding pair label, or can include an affinity tag; a tag, or identifier (e.g., an adaptor, barcode or other sequence identifier).

### TPM3-ALK Fusion Polypeptides

[0293] In another embodiment, the TPM3-ALK fusion comprises an amino acid sequence (e.g., a fragment of the amino acid sequence) shown in SEQ ID NO:10 and an amino acid sequence (e.g., a fragment of the amino acid sequence) shown in SEQ ID NO:7, or a fragment of the fusion. In one embodiment, the TPM3-ALK fusion comprises an amino acid sequence substantially identical to the amino acid sequence (e.g., a fragment of the amino acid sequence) shown in SEQ ID NO: 10 and the amino acid sequence (e.g., a fragment of the amino acid sequence) shown in SEQ ID NO:7, or a fragment thereof. In one embodiment, the TPM3-ALK fusion comprises an amino acid sequence at least 70%, at least 75%, at least 80%, at least 85%, at least 90%, at least 95%, at least 99%, at least 99.5 or greater, identical to the amino acid sequence (e.g., a fragment of the amino acid sequence) shown in SEQ ID NO:10 and the amino acid sequence (e.g., a fragment of the amino acid sequence) shown in SEQ ID NO:7. In one embodiment, the TPM3-ALK fusion comprises a sequence containing at least 10, 20, 50, 100, 500, 600, 700, 800, 900, 1000, or more amino acids of the amino acid sequence shown in SEQ ID NO: 10 and SEQ ID NO:7. In one embodiment, the TPM3-ALK fusion comprises an amino acid sequence containing at least 5, 10, 20, 50, 100, 500, 600, 700, 800, 900, 1000, or more contiguous amino acids of the amino acid sequence shown in SEQ ID NO:10 and at least 5, 10, 20, 50, 100, 500, 600, 700, 800, 900, 1000, or more contiguous amino acids of the amino acid sequence shown in SEQ ID NO:7. In one embodiment, the 5′ TPM3-3′ ALK fusion polypeptide includes a receptor tyrosine kinase domain or a functional fragment thereof. In an embodiment, the 5′TPM3-3′ALK fusion polypeptide comprises sufficient ALK and sufficient TPM3 sequence such that it has kinase activity, e.g., has elevated activity.

[0294] In another aspect, the invention features a TPM3-ALK fusion polypeptide (e.g., a purified TPM3-ALK fusion polypeptide), a biologically active or antigenic fragment thereof, as well as reagents (e.g., antibody molecules that bind to a TPM3-ALK fusion polypeptide), methods for modulating a TPM3-ALK polypeptide activity and detection of a TPM3-ALK polypeptide.

[0295] In one embodiment, the TPM3-ALK fusion polypeptide has at least one biological activity. In one embodiment, at least one biological activity of the TPM3-ALK fusion polypeptide is reduced or inhibited by an anti-cancer drug, e.g., a TPM3 inhibitor, an ALK inhibitor. In one embodiment, at least one biological activity of the TPM3-ALK fusion polypeptide is reduced or inhibited by an ALK inhibitor. In one embodiment, at least one biological activity of the TPM3-ALK fusion polypeptide is reduced or inhibited by a TPM3 inhibitor. In one embodiment, at least one biological activity of the TPM3-ALK fusion polypeptide is reduced or inhibited by an ALK inhibitor, e.g., TAE-684 (also referred to herein as “NVP-TAE694”), PF02341066 (also referred to herein as “crizotinib” or “1066”), AF-802, LDK-378, ASP-3026, CEP-37440, CEP-28122, CEP-108050. MK-2206, perifosine, sorafenib and AP26113; and additional examples of ALK kinase inhibitors are described in examples 3-39 of WO 2005016894 by Garcia-Echeverria C, et al.

[0296] In yet other embodiments, the TPM3-ALK fusion polypeptide is encoded by a nucleic acid molecule described herein. In one embodiment, the TPM3-ALK fusion polypeptide is encoded by an in-frame fusion of intron 8 of TPM3 with intron 19 of ALK (e.g., a sequence on chromosome 1 and a sequence on chromosome 2. In another embodiment, the TPM3-ALK fusion polypeptide includes an amino acid sequence encoded by a nucleotide sequence comprising a fusion junction between the TPM3 transcript and the ALK transcript.

[0297] In certain embodiments, the TPM3-ALK fusion polypeptide comprises one or more of encoded exons 1-8 from TPM3 and one or more of encoded exons 20-29 of ALK. In certain embodiments, the TPM3-ALK fusion polypeptide comprises at least 1, 2, 3, 4, 5, 6, 7, 8 or more encoded exons of TPM3 and at least at least 1, 2, 3, 4, 5, 6, 7, 8, 4, 5, 6, 7, 8, 9, 10 or more encoded exons of ALK. In certain embodiments, the TPM3-ALK fusion polypeptide comprises a fusion of encoded exon 8 from TPM3 and encoded exon 20 from ALK (or a fragment thereof). In other embodiments, the fusion comprises at least 1, 2, 3, 4, 5, 6, 7, 8 or more encoded exons of TPM3; and at least 1, 2, 3, 4, 5, 6, 7, 8, 4, 5, 6, 7, 8, 9, 10 or more encoded exons of ALK. In certain embodiments, the TPM3-ALK fusion polypeptide comprises encoded exons 1-8 from TPM3 and exons 20-29 of ALK. In certain embodiments, the 5′ TPM3-3′ ALK fusion polypeptide comprises a fusion junction of the sequence of exon 8 from TPM3 and the sequence of exon 20 from ALK.

[0298] In certain embodiments, the TPM3-ALK fusion comprises the amino acid sequence corresponding to exon 8 or a fragment thereof from TPM3, and the amino acid sequence corresponding to exon 20 or a fragment thereof from ALK (e.g., as shown in SEQ ID NO:10 and SEQ ID NO:7). In one embodiment, the TPM3-ALK fusion comprises at least 5, 10, 15, 20 or more amino acids from exon 8 of TPM3 (e.g., from the amino acid sequence of TPM3 preceding the fusion junction with ALK, e.g., of the TPM3 sequence shown in SEQ ID NO:10), and at least 5, 10, 15, 20 or more amino acids from exon 20 of ALK (e.g., from the amino acid sequence of ALK following the fusion junction with TPM3, e.g., of the ALK sequence shown in SEQ ID NO:7).

[0299] In one embodiment, the TPM3-ALK fusion polypeptide includes a tyrosine kinase domain or a functional fragment thereof. In a related aspect, the invention features TPM3-ALK fusion polypeptide or fragments operatively linked to heterologous polypeptides to form fusion proteins.

[0300] In another embodiment, the TPM3-ALK fusion polypeptide or fragment is a peptide, e.g., an immunogenic peptide or protein that contains a fusion junction described herein. Such immunogenic peptides or proteins can be used to raise antibodies specific to the fusion protein. In other embodiments, such immunogenic peptides or proteins can be used for vaccine preparation. The vaccine preparation can include other components, e.g., an adjuvant.

[0301] In another aspect, the invention features antibody molecules that bind to a TPM3-ALK fusion polypeptide or fragment described herein. In embodiments, the antibody can distinguish wild type ALK (or TPM3) from TPM3-ALK.

### Detection Reagents and Detection of Mutations

[0302] In another aspect, the invention features a detection reagent, e.g., a purified or an isolated preparation thereof. Detection reagents can distinguish a nucleic acid, or protein sequence, having a breakpoint, e.g., a TPM3-ALK breakpoint; from a reference sequence. In one embodiment, the detection reagent detects (e.g., specifically detects) a TPM3-ALK fusion nucleic acid or a polypeptide, e.g., distinguishes a wild type ALK or another ALK fusion (or TPM3) from a TPM3-ALK nucleic acid (e.g., as described herein in SEQ ID NO:9 and SEQ ID NO:7); or a TPM3-ALK polypeptide (e.g., as described herein in SEQ ID NO: 10 and SEQ ID NO:7).

[0303] Detection reagents, e.g., nucleic acid-based detection reagents, can be used to identify mutations in a target nucleic acid, e.g., DNA, e.g., genomic DNA or cDNA, or RNA, e.g., in a sample, e.g., a sample of nucleic acid derived from a neoplastic or tumor cell, e.g., a melanocytic neoplasm, melanoma or metastatic cell. Detection reagents, e.g., antibody-based detection reagents, can be used to identify mutations in a target protein, e.g., in a sample, e.g., a sample of protein derived from, or produced by, a neoplastic or tumor cell, e.g., a melanocytic neoplasm, melanoma or metastatic cell.

### Method of Treatment

[0304] In a related aspect, a method of inhibiting, reducing, or treating a hyperproliferative disorder, e.g., a neoplasm (including benign, pre-malignant or malignant (e.g., a cancer), in a subject is provided. The method includes administering to the subject a preselected therapeutic agent, e.g., an anti-cancer agent (e.g., a kinase inhibitor), as a single agent, or in combination, in an amount sufficient to reduce, inhibit or treat the activity or expression of TPM3-ALK (e.g., a TPM3-ALK fusion described herein), thereby inhibiting, reducing, or treating the hyperproliferative disorder in the subject.

[0305] In one embodiment, the subject treated has a TPM3-ALK fusion; e.g., the subject has a tumor or cancer harboring a TPM3-ALK fusion. In other embodiments, the subject has been previously identified as having a TPM3-ALK fusion. In yet other embodiments, the subject has been previously identified as being likely or unlikely to respond to treatment with a protein kinase inhibitor, e.g., a subject that has previously participated in a clinical trial. In other embodiments, the subject has been previously identified as being likely or unlikely to respond to treatment with a protein kinase inhibitor, based on the presence of the TPM3-ALK fusion. In one embodiment, the subject is a mammal, e.g., a human. In one embodiment, the subject has, or at risk of having a cancer at any stage of disease. In other embodiments, the subject is a patient, e.g., a cancer patient.

[0306] In certain embodiments, the neoplasm or neoplastic cell is a benign, pre-malignant, malignant (cancer) or metastasis. In certain embodiments, the cancer is a solid tumor, a soft tissue tumor, or a metastatic lesion.

[0307] In one embodiment, the neoplasm or neoplastic cell is a benign, pre-malignant, malignant (cancer) or metastasis. In certain embodiments, the cancer is a solid tumor, a soft tissue tumor, or a metastatic lesion. In one embodiment, the cancer is a carcinoma. In one embodiment, the cancer is an adenocarcinoma. In an embodiment, the cancer is a lung adenocarcinoma. In one embodiment, the cancer is chosen from a lung cancer, a pancreatic cancer, melanoma, a colorectal cancer, an esophageal-gastric cancer, a thyroid cancer, or an adenocarcinoma. In one embodiment, the cancer is a lymphoma. In one embodiment, the cancer is an anaplastic large cell lymphoma. In one embodiment, the cancer is an inflammatory myofibrotic tumor. In one embodiment, the cancer is a lung adenocarcinoma. In other embodiment, the lung cancer is chosen from one or more of the following: non-small cell lung cancer (NSCLC), small cell lung cancer (SCLC), squamous cell carcinoma (SCC), adenocarcinoma of the lung, bronchogenic carcinoma, or a combination thereof. In one embodiment, the lung cancer is NSCLC or SCC.

[0308] In one embodiment, the anti-cancer agent is an ALK inhibitor. In one embodiment, the anti-cancer agent is a TPM3 inhibitor. In one embodiment, the anti-cancer agent is a kinase inhibitor. In one embodiment, the anti-cancer agent is an ALK inhibitor, e.g., TAE-684 (also referred to herein as “NVP-TAE694”), PF02341066 (also referred to herein as “crizotinib” or “1066”), AF-802, LDK-378, ASP-3026, CEP-37440, CEP-28122, CEP-108050, MK-2206, perifosine, sorafenib and AP26113; and additional examples of ALK kinase inhibitors are described in examples 3-39 of WO 2005016894 by Garcia-Echeverria C, et al.

### GOLGA5-RET Fusions

[0309] In one embodiment, a fusion includes an in-frame fusion of an exon of golgin A5 (GOLGA5), e.g., one more exons of GOLGA5 (e.g., one or more of exons 1-7 of GOLGA5) or a fragment thereof, and an exon of ret proto-oncogene (RET), e.g., one or more exons of a RET (e.g., one or more of exons 12-19 of RET) or a fragment thereof. For example, the GOLGA5-RET fusion can include an in-frame fusion within an intron of GOLGA5 (e.g., intron 7) or a fragment thereof, with an intron of RET (e.g., intron 1) or a fragment thereof. In one embodiment, the fusion of the GOLGA5-RET fusion comprises the nucleotide sequence of: chromosome 14 at one or more of a nucleotide (plus or minus 10, 20, 30, 50, 60, 70, 80, 100 or more nucleotides) and chromosome 10 at one or more of a nucleotide (plus or minus 10, 20, 30, 50, 60, 70, 80, 100 or more nucleotides). In one embodiment, the GOLGA5-RET fusion is a translocation, e.g., a translocation of a portion of chromosome 14 and a portion of chromosome 10.

[0310] In certain embodiments, the GOLGA5-RET fusion is in a 5′-GOLGA5 to 3′-RET configuration (also referred to herein as “5′-GOLGA5-RET-3′).” The term “fusion” or “fusion molecule” can refer to a polypeptide or a nucleic acid fusion, depending on the context. It may include a full-length sequence of a fusion or a fragment thereof, e.g., a fusion junction (e.g., a fragment including a portion of GOLGA5 and a portion of RET, e.g., a portion of the GOLGA5-RET fusion described herein). In one embodiment, the GOLGA5-RET fusion polypeptide includes a fragment of the amino acid sequence shown in SEQ ID NO:48 and a fragment of the amino acid sequence shown in SEQ ID NO:6, or an amino acid sequence substantially identical thereto. In another embodiment, the GOLGA5-RET fusion nucleic acid includes a fragment of the nucleotide sequence shown in SEQ ID NO:47 and a fragment of the nucleotide sequence shown in SEQ ID NO:5, or a nucleotide sequence substantially identical thereto. In one embodiment, the GOLGA5-RET fusion polypeptide comprises sufficient GOLGA5 and sufficient RET sequence such that the 5′ GOLGA5-3′ RET fusion has kinase activity, e.g., has elevated activity, e.g., tyrosine kinase activity. In any event, the fusion causes activation in the cells harboring it of oncogenic signaling pathways.

[0311] In certain embodiments, the GOLGA5-RET fusion comprises one or more (or all of) exons 1-7 from GOLGA5 and one or more (or all of) exons 12-19 of RET (e.g., one or more of the exons shown in SEQ ID NO:47 and SEQ ID NO:5. In another embodiment, the GOLGA5-RET fusion comprises one or more (or all of) exons 1-7 of GOLGA5 and one or more (or all of) exons 12-19 of RET. In certain embodiments, the GOLGA5-RET fusion comprises at least 1, 2, 3, 4, 5, 6, 7 or more exons (or encoded exons) from GOLGA5 and at least 1, 2, 3, 4, 5, 6, 7, 8 or more exons (or encoded exons) from RET (e.g., from the GOLGA5 and RET sequences shown in SEQ ID NO:47 and SEQ ID NO:48 and SEQ ID NO:5 and SEQ ID NO:6.

[0312] In certain embodiments, the GOLGA5-RET fusion comprises exons 1-7 or a fragment thereof from GOLGA5, and exons 12-19 or a fragment thereof from RET (e.g., as shown in SEQ ID NO:47 and SEQ ID NO:5). In one embodiment, the GOLGA5-RET fusion comprises at least 5, 10, 15, 20, 30, 40, 50 or more amino acids from exons 1-7 of GOLGA5 (e.g., from the amino acid sequence of GOLGA5 as shown in SEQ ID NO:48 (e.g., from the amino acid sequence of GOLGA5 preceding the fusion junction with RET, and at least 5, 10, 15, 20, 30, 40, 50 or more amino acids from exons 12-19 of RET (e.g., from the amino acid sequence of RET as shown in SEQ ID NO:6). In another embodiment, the GOLGA5-RET fusion comprises at least 6, 12, 15, 20, 25, 50, 75, 100 or more nucleotides from exons 1-7 of GOLGA5 (e.g., from the nucleotide sequence of GOLGA5 as shown in SEQ ID NO:47 (e.g., from the nucleotide sequence of GOLGA5 preceding the fusion junction with RET); and at least 6, 12, 15, 20, 25, 50, 75, 100 or more nucleotides from exons 12-19 of RET (e.g., from the nucleotide sequence of RET as shown in SEQ ID NO:5).

[0313] In one embodiment, the GOLGA5-RET fusion includes the full sequence or a fragment of the nucleotide sequence shown in SEQ ID NO:45 and SEQ ID NO:102, or a nucleotide sequence substantially identical thereto. In another embodiment, the GOLGA5-RET fusion polypeptide includes the full sequence or a fragment of the amino acid sequence shown in SEQ ID NO:46 and SEQ ID NO: 103, or an amino acid sequence substantially identical thereto, for example, at least 70% or at least 80% or at least 90% identical or even more.

### GOLGA5-RET Nucleic Acid Molecules

[0314] In one aspect, the invention features a nucleic acid molecule (e.g., an isolated or purified) nucleic acid molecule that includes a fragment of a GOLGA5 gene and a fragment of a RET gene. In one embodiment, the nucleotide sequence encodes a GOLGA5-RET fusion polypeptide that includes a tyrosine kinase domain or a functional fragment thereof. In another embodiment, the nucleotide sequence encodes a fragment of the RET polypeptide including the amino acid sequence of SEQ ID NO:6 or a fragment thereof, or a sequence substantially identical thereto. In other embodiments, the nucleic acid molecule includes a fragment of the GOLGA5 gene encoding the amino acid sequence of SEQ ID NO:48 or a fragment thereof, or a sequence substantially identical thereto. In yet other embodiments, the nucleic acid molecule includes a nucleotide sequence encoding the amino acid sequence shown in SEQ ID NO:48, or a fragment thereof, and the amino acid sequence shown in SEQ ID NO:6 or a fragment thereof, or a sequence substantially identical thereto.

[0315] In one embodiment, the nucleic acid molecule includes a fusion. e.g., an in-frame fusion, between an intron of GOLGA5 (e.g., intron 7, or a fragment thereof), and an intron of RET (e.g., intron 11, or a fragment thereof). The GOLGA5-RET fusion can comprise a fusion of the nucleotide sequence of: chromosome 14 at one or more of a nucleotide (plus or minus 10, 20, 30, 50, 60, 70, 80, 100 nucleotides) and chromosome 10 at one or more of a nucleotide (plus or minus 10, 20, 30, 50, 60, 70, 80, 100 nucleotides), or a fragment thereof. In one embodiment, the GOLGA5-RET fusion comprises a fusion of the nucleotide sequence of: chromosome 14 at one or more of a nucleotide (plus or minus 10, 20, 30, 50, 60, 70, 80, 100 nucleotides) and chromosome 10 at one or more of a nucleotide (plus or minus 10, 20, 30, 50, 60, 70, 80, 100 nucleotides), or a fragment thereof.

[0316] In another embodiment, the GOLGA5-RET fusion comprises a nucleotide sequence (e.g., a fragment of a nucleotide sequence) shown in SEQ ID NO:47 and a nucleotide sequence (e.g., a fragment of a nucleotide sequence) shown in SEQ ID NO:5, or a fragment of the fusion. In one embodiment, the GOLGA5-RET fusion comprises a nucleotide sequence substantially identical to the nucleotide sequence (e.g., a fragment of a nucleotide sequence) shown in SEQ ID NO:47 and the nucleotide sequence (e.g., a fragment of a nucleotide sequence) shown SEQ ID NO:5, or a fragment of the fusion. In one embodiment, the GOLGA5-RET fusion comprises a nucleotide sequence at least 70%, at least 75%, at least 80%, at least 85%, at least 90%, at least 95%, at least 99%, at least 99.5 or greater, identical to the nucleotide sequence (e.g., a fragment of a nucleotide sequence) shown in SEQ ID NO:47 and to the nucleotide sequence (e.g., a fragment of a nucleotide sequence) shown in SEQ ID NO:5. In one embodiment, the GOLGA5-RET fusion comprises a nucleotide sequence containing at least 25, 50, 100, 150, 200, 500, 1000, 1500, 2000, 2500, 3000, or more nucleotides of the nucleotide sequence shown in SEQ ID NO:47 and a nucleotide sequence containing at least 25, 50, 100, 150, 200, 500, 1000, 1500, 2000, 2500, 3000, or more nucleotides of the nucleotide sequence shown in SEQ ID NO:5. In one embodiment, the GOLGA5-RET fusion comprises a nucleotide sequence containing at least 25, 50, 100, 150, 200, 500, 1000, 1500, 2000, 2500, 3000, or more contiguous nucleotides of the nucleotide sequence shown in SEQ ID NO:47 and a nucleotide sequence containing at least 25, 50, 100, 150, 200, 500, 1000, 1500, 2000, 2500, 3000, or more nucleotides of the nucleotide sequence shown in SEQ ID NO:5.

[0317] In another embodiment, the nucleic acid molecule includes a fusion, e.g., an in-frame fusion, of at least 1, 2, 3, 4, 5, 6, 7 or more exons of GOLGA5 or a fragment thereof (e.g., one or more of exons 1-7 of GOLGA5 or a fragment thereof), and at least 1, 2, 3, 4, 5, 6, 7, 8 or more exons of RET or a fragment thereof (e.g., one or more of exons 12-19 of RET or a fragment thereof). In yet other embodiments, the nucleic acid molecule includes a fragment the nucleotide sequence shown in SEQ ID NO:47 and a fragment of the nucleotide sequence shown in SEQ ID NO:5 or a fragment of the fusion, or a sequence substantially identical thereto.

[0318] In one embodiment, the nucleic acid molecule is complementary to at least a portion of a nucleotide sequence disclosed herein, e.g., is capable of hybridizing under a stringency condition described herein to SEQ ID NO:47 and/or SEQ ID NO:5, or a fragment thereof. In yet another embodiment, the nucleic acid molecule hybridizes to a nucleotide sequence that is complementary to at least a portion of a nucleotide sequence disclosed herein, e.g., is capable of hybridizing under a stringency condition to a nucleotide sequence complementary to SEQ ID NO:47 and/or SEQ ID NO:5, or a fragment thereof. The nucleotide sequence of a cDNA encoding an exemplary 5′ GOLGA5-3′ RET fusion is shown in at least exon 7 (e.g., exons 1-7) of SEQ ID NO:47 and at least exon 12 (e.g., exons 12-19) of SEQ ID NO:5, and the predicted amino acid sequence is shown in the corresponding encoded exons of SEQ ID NO:48 and the corresponding encoded exons of SEQ ID NO:6, respectively.

[0319] In an embodiment the GOLGA5-RET nucleic acid molecule comprises sufficient GOLGA5 and sufficient RET sequence such that the encoded 5′ GOLGA5-3′ RET fusion has kinase activity, e.g., has elevated activity. In certain embodiments, the 5′ GOLGA5-3′ RET fusion comprises exons 1-7 from GOLGA5 and exons 12-19 from RET. In certain embodiments, the GOLGA5-RET fusion comprises at least 1, 2, 3, 4, 5, 6, 7 or more exons from GOLGA5 and at least at least 1, 2, 3, 4, 5, 6, 7, 8 or more exons of RET. In certain embodiments, the GOLGA5-RET fusion comprises a fusion of exon 7 from GOLGA5 and exon 12 from RET. In another embodiment, the GOLGA5-RET fusion comprises 1, 2, 3, 4, 5, 6, 7 or more exons of GOLGA5; and at least 1, 2, 3, 4, 5, 6, 7, 8 or more exons of RET.

[0320] In one embodiment, the nucleic acid molecule includes a nucleotide sequence that has an in-frame fusion of intron 7 of GOLGA5 (e.g., NM_{—}005113) with intron 11 of RET (e.g., NM_{—}020630). In another embodiment, the nucleic acid molecule includes a nucleotide sequence that includes a breakpoint. For example, the nucleic acid molecule includes a nucleotide sequence that includes the fusion junction between the GOLGA5 gene and the RET gene, e.g., the breakpoint between intron 7 of GOLGA5 and intron 11 of RET. In other embodiments, the nucleic acid molecules includes a nucleotide sequence of one or more of nucleotide of chromosome 14 coupled to (e.g., directly or indirectly juxtaposed to) one or more of nucleotide of chromosome 10. In one embodiment, the nucleic acid molecule includes the nucleotide sequence of: chromosome 14 at one or more of a nucleotide plus or minus 10, 20, 30, 40 50, 60, 80, 100, 150 nucleotides and chromosome 10 at one or more of a nucleotide plus or minus 10, 20, 30, 40 50, 60, 80, 100, 150 nucleotides (corresponding to the breakpoint of a GOLGA5-RET fusion), or a fragment thereof, or a sequence substantially identical thereto. In one embodiment, the nucleic acid molecule is complementary to at least a portion of a nucleotide sequence disclosed herein, e.g., is capable of hybridizing under a stringency condition described herein to SEQ ID NO:47 and/or SEQ ID NO:5 or a fragment thereof. In yet other embodiment, the nucleic acid molecule hybridizes to a nucleotide sequence that is complementary to at least a portion of a nucleotide sequence disclosed herein, e.g., is capable of hybridizing under a stringency condition described herein to a nucleotide sequence complementary to SEQ ID NO:47 or SEQ ID NO:5 or a fragment thereof.

[0321] In another embodiment, the GOLGA5-RET fusion nucleic acid comprises at least 6, 12, 15, 20, 25, 50, 75, 100 or more nucleotides from exon 7 of GOLGA5 (e.g., from the nucleotide sequence of GOLGA5 preceding the fusion junction with RET, e.g., of the GOLGA5 sequence shown in SEQ ID NO:47), and at least 6, 12, 15, 20, 25, 50, 75, 100 or more nucleotides from exon 12 of RET (e.g., from the nucleotide sequence of RET following the fusion junction with GOLGA5, e.g., of the RET sequence shown in SEQ ID NO:5).

[0322] In other embodiments, the nucleic acid molecule includes a nucleotide sequence encoding a GOLGA5-RET fusion polypeptide that includes a fragment of a GOLGA5 gene and a fragment of a RET gene. In one embodiment, the nucleotide sequence encodes a GOLGA5-RET fusion polypeptide that includes e.g., a tyrosine kinase domain or a functional fragment thereof. In yet other embodiments, the nucleic acid molecule includes a nucleotide sequence encoding the amino acid sequence (e.g., a fragment of the amino acid sequence) shown in SEQ ID NO:48 and a nucleotide sequence encoding the amino acid sequence (e.g., a fragment of the amino acid sequence) shown in SEQ ID NO:6, or a fragment of the fusion, or a sequence substantially identical thereto. In one embodiment, the encoded GOLGA5-RET fusion polypeptide includes a tyrosine kinase domain or a functional fragment thereof.

[0323] In a related aspect, the invention features nucleic acid constructs that include the GOLGA5-RET nucleic acid molecules described herein. In certain embodiments, the nucleic acid molecules are operatively linked to a native or a heterologous regulatory sequence. Also included are vectors and host cells that include the GOLGA5-RET nucleic acid molecules described herein. e.g., vectors and host cells suitable for producing the nucleic acid molecules and polypeptides described herein.

[0324] In a related aspect, methods of producing the nucleic acid molecules and polypeptides described herein are also described.

[0325] In another aspect, the invention features nucleic acid molecules that reduce or inhibit the expression of a nucleic acid molecule that encodes a GOLGA5-RET fusion described herein. Examples of such nucleic acid molecules include, for example, antisense molecules, ribozymes, RNAi, triple helix molecules that hybridize to a nucleic acid encoding GOLGA5-RET, or a transcription regulatory region of GOLGA5-RET, and blocks or reduces mRNA expression of GOLGA5-RET.

### Nucleic Acid Detection and Capturing Reagents

[0326] The invention also features a nucleic acid molecule, e.g., nucleic acid fragment, suitable as probe, primer, bait or library member that includes, flanks, hybridizes to, which are useful for identifying, or are otherwise based on, the GOLGA5-RET fusions described herein. In certain embodiments, the probe, primer or bait molecule is an oligonucleotide that allows capture, detection or isolation of a GOLGA5-RET fusion nucleic acid molecule described herein. The oligonucleotide can comprise a nucleotide sequence substantially complementary to a fragment of the GOLGA5-RET fusion nucleic acid molecules described herein. The sequence identity between the nucleic acid fragment, e.g., the oligonucleotide, and the target GOLGA5-RET sequence need not be exact, so long as the sequences are sufficiently complementary to allow the capture, detection or isolation of the target sequence. In one embodiment, the nucleic acid fragment is a probe or primer that includes an oligonucleotide between about 5 and 25, e.g., between 10 and 20, or 10 and 15 nucleotides in length. In other embodiments, the nucleic acid fragment is a bait that includes an oligonucleotide between about 100 to 300 nucleotides, 130 and 230 nucleotides, or 150 and 200 nucleotides, in length.

[0327] In one embodiment, the nucleic acid fragment can be used to identify or capture, e.g., by hybridization, a GOLGA5-RET fusion. For example, the nucleic acid fragment can be a probe, a primer, or a bait, for use in identifying or capturing, e.g., by hybridization, a GOLGA5-RET fusion described herein. In one embodiment, the nucleic acid fragment can be useful for identifying or capturing a GOLGA5-RET breakpoint, e.g., the nucleotide sequence of: chromosome 14 at nucleotide plus or minus 10, 20, 30, 40, 50, 60, 80, 100, 150 nucleotides and chromosome 10 at nucleotide plus or minus 10, 20, 30, 40 50, 60, 80, 100, 150 nucleotides.

[0328] In one embodiment, the nucleic acid fragment hybridizes to a nucleotide sequence within a chromosomal rearrangement that creates an in-frame fusion of intron 7 of GOLGA5 with intron 11 of RPET. In one embodiment, the nucleic acid fragment hybridizes to a nucleotide sequence in the region In other embodiments, the nucleic acid molecules includes a nucleotide sequence in the region of a nucleotide sequence of chromosome 14 coupled to (e.g., juxtaposed to) nucleotides in the region of a nucleotide sequence Y of chromosome 10. In one embodiment, the nucleic acid fragment hybridizes to a nucleotide sequence that includes a breakpoint, e.g., the nucleotide sequence of: chromosome 14 at nucleotide plus or minus 10, 20, 30, 40 50, 60, 80, 100, 150 or more nucleotides and chromosome 10 at nucleotide plus or minus 10, 20, 30, 40 50, 60, 80, 100, 150 or more nucleotides. For example, the nucleic acid fragment can hybridize to a nucleotide sequence that includes the fusion junction between the GOLGA5 gene and the RET gene, e.g., a nucleotide sequence that includes a portion of a nucleotide sequence within intron 7 of a GOLGA5 gene and intron 11 of a RET gene.

[0329] In another embodiment, the nucleic acid fragment hybridizes to a nucleotide sequence that comprises at least 6, 12, 15, 20, 25, 50, 75, 100, 150 or more nucleotides from exon 7 of GOLGA5 (e.g., from the nucleotide sequence of GOLGA5 preceding the fusion junction with RET, e.g., of the GOLGA5 sequence shown in SEQ ID NO:47), and at least 6, 12, 15, 20, 25, 50, 75, 100, 150 or more nucleotides from exon 12 of RET (e.g., from the nucleotide sequence of RET following the fusion junction with GOLGA5, e.g., of the RET sequence shown in SEQ ID NO:5).

[0330] The probes or primers described herein can be used, for example, for FISH detection or PCR amplification. In one exemplary embodiment where detection is based on PCR, amplification of the GOLGA5-RET fusion junction fusion junction can be performed using a primer or a primer pair, e.g., for amplifying a sequence flanking the fusion junctions described herein, e.g., the mutations or the junction of a chromosomal rearrangement described herein, e.g., GOLGA5-RET.

[0331] In one embodiment, a pair of isolated oligonucleotide primers can amplify a region containing or adjacent to a position in the GOLGA5-RET fusion. For example, forward primers can be designed to hybridize to a nucleotide sequence within GOLGA5 genomic or mRNA sequence (e.g., a nucleotide sequence within exon 7 of GOLGA5 of SEQ ID NO:47), and the reverse primers can be designed to hybridize to a nucleotide sequence of RET (e.g., a nucleotide sequence within exon 12 of RET, of SEQ ID NO:5).

[0332] In another embodiment, the nucleic acid fragments can be used to identify, e.g., by hybridization, a GOLGA5-RET fusion. In one embodiment, the nucleic acid fragment hybridizes to a nucleotide sequence that includes a fusion junction between the GOLGA5 transcript and the RET transcript.

[0333] In other embodiments, the nucleic acid fragment includes a bait that comprises a nucleotide sequence that hybridizes to a GOLGA5-RET fusion nucleic acid molecule described herein, and thereby allows the capture or isolation said nucleic acid molecule. In one embodiment, a bait is suitable for solution phase hybridization. In other embodiments, a bait includes a binding entity, e.g., an affinity tag, that allows capture and separation, e.g., by binding to a binding entity, of a hybrid formed by a bait and a nucleic acid hybridized to the bait.

[0334] In other embodiments, the nucleic acid fragment includes a library member comprising a GOLGA5-RET nucleic acid molecule described herein. In one embodiment, the library member includes a rearrangement that results in a GOLGA5-RET fusion described herein.

[0335] The nucleic acid fragment can be detectably labeled with, e.g., a radiolabel, a fluorescent label, a bioluminescent label, a chemiluminescent label, an enzyme label, a binding pair label, or can include an affinity tag; a tag, or identifier (e.g., an adaptor, barcode or other sequence identifier).

### GOLGA5-RET Fusion Polypeptides

[0336] In another embodiment, the GOLGA5-RET fusion comprises an amino acid sequence (e.g., a fragment of the amino acid sequence) shown in SEQ ID NO:48 and an amino acid sequence (e.g., a fragment of the amino acid sequence) shown in SEQ ID NO:6, or a fragment of the fusion. In one embodiment, the GOLGA5-RET fusion comprises an amino acid sequence substantially identical to the amino acid sequence (e.g., a fragment of the amino acid sequence) shown in SEQ ID NO:48 and the amino acid sequence (e.g., a fragment of the amino acid sequence) shown in SEQ ID NO:6, or a fragment thereof. In one embodiment, the GOLGA5-RET fusion comprises an amino acid sequence at least 70%, at least 75%, at least 80%, at least 85%, at least 90%, at least 95%, at least 99%, at least 99.5 or greater, identical to the amino acid sequence (e.g., a fragment of the amino acid sequence) shown in SEQ ID NO:48 and the amino acid sequence (e.g., a fragment of the amino acid sequence) shown in SEQ ID NO:6. In one embodiment, the GOLGA5-RET fusion comprises a sequence containing at least 10, 20, 50, 100, 500, 600, 700, 800, 900, 1000, or more amino acids of the amino acid sequence shown in SEQ ID NO:48 and SEQ ID NO:6. In one embodiment, the GOLGA5-RET fusion comprises an amino acid sequence containing at least 5, 10, 20, 50, 100, 500, 600, 700, 800, 900, 1000, or more contiguous amino acids of the amino acid sequence shown in SEQ ID NO:48 and at least 5, 10, 20, 50, 100, 500, 600, 700, 800, 900, 1000, or more contiguous amino acids of the amino acid sequence shown in SEQ ID NO:6. In one embodiment, the 5′ GOLGA5-3′ RET fusion polypeptide includes a receptor tyrosine kinase domain or a functional fragment thereof. In an embodiment, the 5′GOLGA5-3′RET fusion polypeptide comprises sufficient RET and sufficient GOLGA5 sequence such that it has kinase activity, e.g., has elevated activity.

[0337] In another aspect, the invention features a GOLGA5-RET fusion polypeptide (e.g., a purified GOLGA5-RET fusion polypeptide), a biologically active or antigenic fragment thereof, as well as reagents (e.g., antibody molecules that bind to a GOLGA5-RET fusion polypeptide), methods for modulating a GOLGA5-RET polypeptide activity and detection of a GOLGA5-RET polypeptide.

[0338] In one embodiment, the GOLGA5-RET fusion polypeptide has at least one biological activity. In one embodiment, at least one biological activity of the GOLGA5-RET fusion polypeptide is reduced or inhibited by an anti-cancer drug, e.g., a GOLGA5 inhibitor, a RET inhibitor. In one embodiment, at least one biological activity of the GOLGA5-RET fusion polypeptide is reduced or inhibited by a RET inhibitor. In one embodiment, at least one biological activity of the GOLGA5-RET fusion polypeptide is reduced or inhibited by a GOLGA5 inhibitor. In one embodiment, at least one biological activity of the GOLGA5-RET fusion polypeptide is reduced or inhibited by a RET inhibitor, e.g., CEP-701 and CEP-751; 2-indolinone, e.g., RPI-1; and quinazoline, e.g., ZD6474; or TG101209.

[0339] In yet other embodiments, the GOLGA5-RET fusion polypeptide is encoded by a nucleic acid molecule described herein. In one embodiment, the GOLGA5-RET fusion polypeptide is encoded by an in-frame fusion of intron 7 of GOLGA5 with intron 11 of RET (e.g., a sequence on chromosome 14 and a sequence on chromosome 10). In another embodiment, the GOLGA5-RET fusion polypeptide includes an amino acid sequence encoded by a nucleotide sequence comprising a fusion junction between the GOLGA5 transcript and the RET transcript.

[0340] In certain embodiments, the GOLGA5-RET fusion polypeptide comprises one or more of encoded exons 1-7 from GOLGA5 and one or more of encoded exons 12-19 of RET. In certain embodiments, the GOLGA5-RET fusion polypeptide comprises at least 1, 2, 3, 4, 5, 6, 7 or more encoded exons of GOLGA5 and at least at least 1, 2, 3, 4, 5, 6, 7, 8 or more encoded exons of RET. In certain embodiments, the GOLGA5-RET fusion polypeptide comprises a fusion of encoded exon 7 from GOLGA5 and encoded exon 12 from RET (or a fragment thereof). In other embodiments, the fusion comprises at least 1, 2, 3, 4, 5, 6, 7 or more encoded exons of GOLGA5; and at least 1, 2, 3, 4, 5, 6, 7, 8 or more encoded exons of RET. In certain embodiments, the GOLGA5-RET fusion polypeptide comprises encoded exons 1-7 from GOLGA5 and exons 12-19 of RET. In certain embodiments, the 5′ GOLGA5-3′ RET fusion polypeptide comprises a fusion junction of the sequence of exon 7 from GOLGA5 and the sequence of exon 12 from RET.

[0341] In certain embodiments, the GOLGA5-RET fusion comprises the amino acid sequence corresponding to exon 7 or a fragment thereof from GOLGA5, and the amino acid sequence corresponding to exon 12 or a fragment thereof from RET (e.g., as shown in SEQ ID NO:48 and 30 SEQ ID NO:6). In one embodiment, the GOLGA5-RET fusion comprises at least 5, 10, 15, 20 or more amino acids from exon 7 of GOLGA5 (e.g., from the amino acid sequence of GOLGA5 preceding the fusion junction with RET, e.g., of the GOLGA5 sequence shown in SEQ ID NO:48), and at least 5, 10, 15, 20 or more amino acids from exon 12 of RET (e.g., from the amino acid sequence of RET following the fusion junction with GOLGA5, e.g., of the RET sequence shown in SEQ ID NO:6).

[0342] In one embodiment, the GOLGA5-RET fusion polypeptide includes a tyrosine kinase domain or a functional fragment thereof. In a related aspect, the invention features GOLGA5-RET fusion polypeptide or fragments operatively linked to heterologous polypeptides to form fusion proteins.

[0343] In another embodiment, the GOLGA5-RET fusion polypeptide or fragment is a peptide, e.g., an immunogenic peptide or protein. Such a protein or peptide contains a fusion junction described herein. Such immunogenic peptides or proteins can be used to raise antibodies specific to the fusion protein. In other embodiments, such immunogenic peptides or proteins can be used for vaccine preparation. The vaccine preparation can include other components, e.g., an adjuvant.

[0344] In another aspect, the invention features antibody molecules that bind to a GOLGA5-RET fusion polypeptide or fragment described herein. In embodiments, the antibody can distinguish wild type RET (or GOLGA5) from GOLGA5-RET.

### Detection Reagents and Detection of Mutations

[0345] In another aspect, the invention features a detection reagent, e.g., a purified or an isolated preparation thereof. Detection reagents can distinguish a nucleic acid, or protein sequence, having a breakpoint, e.g., a GOLGA5-RET breakpoint; from a reference sequence. In one embodiment, the detection reagent detects (e.g., specifically detects) a GOLGA5-RET fusion nucleic acid or a polypeptide, e.g., distinguishes a wild type RET or another RET fusion (or GOLGA5) from a GOLGA5-RET nucleic acid (e.g., as described herein in SEQ ID NO:47 and SEQ ID NO:5); or a GOLGA5-RET polypeptide (e.g., as described herein in SEQ ID NO:48 and SEQ ID NO:6).

[0346] Detection reagents, e.g., nucleic acid-based detection reagents, can be used to identify mutations in a target nucleic acid, e.g., DNA, e.g., genomic DNA or cDNA, or RNA, e.g., in a sample, e.g., a sample of nucleic acid derived from a neoplastic or tumor cell, e.g., a melanocytic neoplasm, melanoma or metastatic cell. Detection reagents, e.g., antibody-based detection reagents, can be used to identify mutations in a target protein, e.g., in a sample, e.g., a sample of protein derived from, or produced by, a neoplastic or tumor cell, e.g., a melanocytic neoplasm, melanoma or metastatic cell.

### Method of Treatment

[0347] In a related aspect, a method of inhibiting, reducing, or treating a hyperproliferative disorder, e.g., a neoplasm (including benign, pre-malignant or malignant (e.g., a cancer), in a subject is provided. The method includes administering to the subject a preselected therapeutic agent, e.g., an anti-cancer agent (e.g., a kinase inhibitor), as a single agent, or in combination, in an amount sufficient to reduce, inhibit or treat the activity or expression of GOLGA5-RET (e.g., a GOLGA5-RET fusion described herein), thereby inhibiting, reducing, or treating the hyperproliferative disorder in the subject.

[0348] In one embodiment, the subject treated has a GOLGA5-RET fusion; e.g., the subject has a tumor or cancer harboring a GOLGA5-RET fusion. In other embodiments, the subject has been previously identified as having a GOLGA5-RET fusion. In yet other embodiments, the subject has been previously identified as being likely or unlikely to respond to treatment with a protein kinase inhibitor, e.g., a subject that has previously participated in a clinical trial. In other embodiments, the subject has been previously identified as being likely or unlikely to respond to treatment with a protein kinase inhibitor, based on the presence of the GOLGA5-RET fusion. In one embodiment, the subject is a mammal, e.g., a human. In one embodiment, the subject has, or at risk of having a cancer at any stage of disease. In other embodiments, the subject is a patient, e.g., a cancer patient.

[0349] In certain embodiments, the neoplasm or neoplastic cell is a benign, pre-malignant, malignant (cancer) or metastasis. In certain embodiments, the cancer is a solid tumor, a soft tissue tumor, or a metastatic lesion.

[0350] In one embodiment, the neoplasm or neoplastic cell is a benign, pre-malignant, malignant (cancer) or metastasis. In certain embodiments, the cancer is a solid tumor, a soft tissue tumor, or a metastatic lesion. In one embodiment, the cancer is a carcinoma. In one embodiment, the cancer is an adenocarcinoma. In an embodiment, the cancer is a lung adenocarcinoma. In one embodiment, the cancer is chosen from a lung cancer, a pancreatic cancer, melanoma, a colorectal cancer, an esophageal-gastric cancer, a thyroid cancer, or an adenocarcinoma. In one embodiment, the cancer is thyroid cancer. In one embodiment, the cancer is a papillary thyroid carcinoma. In one embodiment, the cancer is a lung adenocarcinoma. In other embodiment, the lung cancer is chosen from one or more of the following: non-small cell lung cancer (NSCLC), small cell lung cancer (SCLC), squamous cell carcinoma (SCC), adenocarcinoma of the lung, bronchogenic carcinoma, or a combination thereof. In one embodiment, the lung cancer is NSCLC or SCC.

[0351] In one embodiment, the anti-cancer agent is a RET inhibitor. In one embodiment, the anti-cancer agent is a GOLGA5 inhibitor. In one embodiment, the anti-cancer agent is a kinase inhibitor. In one embodiment, the anti-cancer agent is a RET inhibitor, e.g., CEP-701 and CEP-751; 2-indolinone, e.g., RPI-1; and quinazoline, e.g., ZD6474; or TG101209.

### KIF5B-RET Fusions

[0352] In one embodiment, a fusion includes an in-frame fusion of an exon of kinesin family member 5B (KIF5B), e.g., one more exons of KIF5B (e.g., one or more of exons 1-16 of KIF5B) or a fragment thereof, and an exon of ret proto-oncogene (RET), e.g., one or more exons of a RET (e.g., one or more of exons 12-19 of RET) or a fragment thereof. For example, the KIF5B-RET fusion can include an in-frame fusion within an intron of KIF5B (e.g., intron 16) or a fragment thereof, with an intron of RET (e.g., intron 11) or a fragment thereof. In one embodiment, the fusion of the KIF5B-RET fusion comprises the nucleotide sequence of: chromosome 10 at one or more of a nucleotide (plus or minus 10, 20, 30, 50, 60, 70, 80, 100 or more nucleotides) and chromosome 10 at one or more of a nucleotide (plus or minus 10, 20, 30, 50, 60, 70, 80, 100 or more nucleotides). In one embodiment, the KIF5B-RET fusion is a translocation, e.g., a translocation of a portion of chromosome 10 and a portion of chromosome 10.

[0353] In certain embodiments, the KIF5B-RET fusion is in a 5′-KIF5B to 3′-RET configuration (also referred to herein as “5′-KIF5B-RET-3′).” The term “fusion” or “fusion molecule” can refer to a polypeptide or a nucleic acid fusion, depending on the context. It may include a full-length sequence of a fusion or a fragment thereof, e.g., a fusion junction (e.g., a fragment including a portion of KIF5B and a portion of RET, e.g., a portion of the KIF5B-RET fusion described herein). In one embodiment, the KIF5B-RET fusion polypeptide includes a fragment of the amino acid sequence shown in SEQ ID NO:56 and a fragment of the amino acid sequence shown in SEQ ID NO:6, or an amino acid sequence substantially identical thereto. In another embodiment, the KIF5B-RET fusion nucleic acid includes a fragment of the nucleotide sequence shown in SEQ ID NO:55 and a fragment of the nucleotide sequence shown in SEQ ID NO:5, or a nucleotide sequence substantially identical thereto. In one embodiment, the KIF5B-RET fusion polypeptide comprises sufficient KIF5B and sufficient RET sequence such that the 5′ KIF5B-3′ RET fusion has kinase activity. e.g., has elevated activity. In any event, the fusion causes activation in the cells harboring it of oncogenic signaling pathways.

[0354] In certain embodiments, the KIF5B-RET fusion comprises one or more (or all of) exons 1-16 from KIF5B and one or more (or all of) exons 12-19 of RET (e.g., one or more of the exons shown in SEQ ID NO:55 and SEQ ID NO:5. In another embodiment, the KIF5B-RET fusion comprises one or more (or all of) exons 1-16 of KIF5B and one or more (or all of) exons 12-19 of RET. In certain embodiments, the KIF5B-RET fusion comprises at least 1, 2, 3, 4, 5, 6, 7, 8, 9, 10, 11, 12, 13, 14, 15, 16 or more exons (or encoded exons) from KIF5B and at least 1, 2, 3, 4, 5, 6, 7, 8 or more exons (or encoded exons) from RET (e.g., from the KIF5B and RET sequences shown in SEQ ID NO:55 and SEQ ID NO:56 and SEQ ID NO:5 and SEQ ID NO:6.

[0355] In certain embodiments, the KIF5B-RET fusion comprises exons 1-16 or a fragment thereof from KIF5B, and exons 12-19 or a fragment thereof from RET (e.g., as shown in SEQ ID NO:55 and SEQ ID NO:5). In one embodiment, the KIF5B-RET fusion comprises at least 5, 10, 15, 20, 30, 40, 50 or more amino acids from exons 1-16 of KIF5B (e.g., from the amino acid sequence of KIF5B as shown in SEQ ID NO:56 (e.g., from the amino acid sequence of KIF5B preceding the fusion junction with RET, and at least 5, 10, 15, 20, 30, 40, 50 or more amino acids from exons 12-19 of RET (e.g., from the amino acid sequence of RET as shown in SEQ ID NO:6). In another embodiment, the KIF5B-RET fusion comprises at least 6, 12, 15, 20, 25, 50, 75, 100 or more nucleotides from exons 1-16 of KIF5B (e.g., from the nucleotide sequence of KIF5B as shown in SEQ ID NO: 55 (e.g., from the nucleotide sequence of KIF5B preceding the fusion junction with RET); and at least 6, 12, 15, 20, 25, 50, 75, 100 or more nucleotides from exons 12-19 of RET (e.g., from the nucleotide sequence of RET as shown in SEQ ID NO:5).

### KIF5B-RET Nucleic Acid Molecules

[0356] In one aspect, the invention features a nucleic acid molecule (e.g., an isolated or purified) nucleic acid molecule that includes a fragment of a KIF5B gene and a fragment of a RET gene. In one embodiment, the nucleotide sequence encodes a KIF5B-RET fusion polypeptide that includes a tyrosine kinase domain or a functional fragment thereof. In another embodiment, the nucleotide sequence encodes a fragment of the RET polypeptide including the amino acid sequence of SEQ ID NO:6 or a fragment thereof, or a sequence substantially identical thereto. In other embodiments, the nucleic acid molecule includes a fragment of the KIF5B gene encoding the amino acid sequence of SEQ ID NO:56 or a fragment thereof, or a sequence substantially identical thereto. In yet other embodiments, the nucleic acid molecule includes a nucleotide sequence encoding the amino acid sequence shown in SEQ ID NO:56, or a fragment thereof, and the amino acid sequence shown in SEQ ID NO:6 or a fragment thereof, or a sequence substantially identical thereto.

[0357] In one embodiment, the nucleic acid molecule includes a fusion, e.g., an in-frame fusion, between an intron of KIF5B (e.g., intron 16, or a fragment thereof), and an intron of RET (e.g., intron 11, or a fragment thereof). The KIF5B-RET fusion can comprise a fusion of the nucleotide sequence of: chromosome 10 at one or more of a nucleotide (plus or minus 10, 20, 30, 50, 60, 70, 80, 100 nucleotides) and chromosome 10 at one or more of a nucleotide (plus or minus 10, 20, 30, 50, 60, 70, 80, 100 nucleotides), or a fragment thereof. In one embodiment, the KIF5B-RET fusion comprises a fusion of the nucleotide sequence of: chromosome 10 at one or more of a nucleotide (plus or minus 10, 20, 30, 50, 60, 70, 80, 100 nucleotides) and chromosome 10 at one or more of a nucleotide (plus or minus 10, 20, 30, 50, 60, 70, 80, 100 nucleotides), or a fragment thereof.

[0358] In another embodiment, the KIF5B-RET fusion comprises a nucleotide sequence (e.g., a fragment of a nucleotide sequence) shown in SEQ ID NO:55 and a nucleotide sequence (e.g., a fragment of a nucleotide sequence) shown in SEQ ID NO:5, or a fragment of the fusion. In one embodiment, the KIF5B-RET fusion comprises a nucleotide sequence substantially identical to the nucleotide sequence (e.g., a fragment of a nucleotide sequence) shown in SEQ ID NO:55 and the nucleotide sequence (e.g., a fragment of a nucleotide sequence) shown SEQ ID NO:5, or a fragment of the fusion. In one embodiment, the KIF5B-RET fusion comprises a nucleotide sequence at least 70%, at least 75%, at least 80%, at least 85%, at least 90%, at least 95%, at least 99%, at least 99.5 or greater, identical to the nucleotide sequence (e.g., a fragment of a nucleotide sequence) shown in SEQ ID NO:55 and to the nucleotide sequence (e.g., a fragment of a nucleotide sequence) shown in SEQ ID NO:5. In one embodiment, the KIF5B-RET fusion comprises a nucleotide sequence containing at least 25, 50, 100, 150, 200, 500, 1000, 1500, 2000, 2500, 3000, or more nucleotides of the nucleotide sequence shown in SEQ ID NO:55 and a nucleotide sequence containing at least 25, 50, 100, 150, 200, 500, 1000, 1500, 2000, 2500, 3000, or more nucleotides of the nucleotide sequence shown in SEQ ID NO:5. In one embodiment, the KIF5B-RET fusion comprises a nucleotide sequence containing at least 25, 50, 100, 150, 200, 500, 1000, 1500, 2000, 2500, 3000, or more contiguous nucleotides of the nucleotide sequence shown in SEQ ID NO:55 and a nucleotide sequence containing at least 25, 50, 100, 150, 200, 500, 1000, 1500, 2000, 2500, 3000, or more nucleotides of the nucleotide sequence shown in SEQ ID NO:5.

[0359] In another embodiment, the nucleic acid molecule includes a fusion, e.g., an in-frame fusion, of at least 1, 2, 3, 4, 5, 6, 7, 8, 9, 10, 11, 12, 13, 14, 15, 16 or more exons of KIF5B or a fragment thereof (e.g., one or more of exons 1-16 of KIF5B or a fragment thereof), and at least 1, 2, 3, 4, 5, 6, 7, 8 or more exons of RET or a fragment thereof (e.g., one or more of exons 12-19 of RET or a fragment thereof). In yet other embodiments, the nucleic acid molecule includes a fragment the nucleotide sequence shown in SEQ ID NO:55 and a fragment of the nucleotide sequence shown in SEQ ID NO:5 or a fragment of the fusion, or a sequence substantially identical thereto.

[0360] In one embodiment, the nucleic acid molecule is complementary to at least a portion of a nucleotide sequence disclosed herein, e.g., is capable of hybridizing under a stringency condition described herein to SEQ ID NO:55 and/or SEQ ID NO:5, or a fragment thereof. In yet another embodiment, the nucleic acid molecule hybridizes to a nucleotide sequence that is complementary to at least a portion of a nucleotide sequence disclosed herein, e.g., is capable of hybridizing under a stringency condition to a nucleotide sequence complementary to SEQ ID NO:55 and/or SEQ ID NO:5, or a fragment thereof. The nucleotide sequence of a cDNA encoding an exemplary 5′ KIF5B-3′ RET fusion is shown in at least exon 16 (e.g., exons 1-16) of SEQ ID NO:55 and at least exon 12 (e.g., exons 12-19) of SEQ ID NO:5, and the predicted amino acid sequence is shown in the corresponding encoded exons of SEQ ID NO:56 and the corresponding encoded exons of SEQ ID NO:6, respectively.

[0361] In an embodiment the KIF5B-RET nucleic acid molecule comprises sufficient KIF5B and sufficient RET sequence such that the encoded 5′ KIF5B-3′ RET fusion has kinase activity, e.g., has elevated activity. In certain embodiments, the 5′ KIF5B-3′ RET fusion comprises exons 1-16 from KIF5B and exons 12-19 from RET. In certain embodiments, the KIF5B-RET fusion comprises at least 1, 2, 3, 4, 5, 6, 7, 8, 9, 10, 11, 12, 13, 14, 15, 16 or more exons from KIF5B and at least at least 1, 2, 3, 4, 5, 6, 7, 8 or more exons of RET. In certain embodiments, the KIF5B-RET fusion comprises a fusion of exon 16 from KIF5B and exon 12 from RET. In another embodiment, the KIF5B-RET fusion comprises 1, 2, 3, 4, 5, 6, 7, 8, 9, 10, 11, 12, 13, 14, 15, 16 or more exons of KIF5B; and at least 1, 2, 3, 4, 5, 6, 7, 8 or more exons of RET.

[0362] In one embodiment, the nucleic acid molecule includes a nucleotide sequence that has an in-frame fusion of intron 16 of KIF5B (e.g., NM_{—}004521.2) with intron 11 of RET (e.g., NM_{—}020630). In another embodiment, the nucleic acid molecule includes a nucleotide sequence that includes a breakpoint. For example, the nucleic acid molecule includes a nucleotide sequence that includes the fusion junction between the KIF5B gene and the RET gene, e.g., the breakpoint between intron 16 of KIF5B and intron 11 of RET. In other embodiments, the nucleic acid molecules includes a nucleotide sequence of one or more of nucleotide of chromosome 10 coupled to (e.g., directly or indirectly juxtaposed to) one or more of nucleotide of chromosome 10. In one embodiment, the nucleic acid molecule includes the nucleotide sequence of: chromosome 10 at one or more of a nucleotide plus or minus 10, 20, 30, 40 50, 60, 80, 100, 150 nucleotides and chromosome 10 at one or more of a nucleotide plus or minus 10, 20, 30, 40 50, 60, 80, 100, 150 nucleotides (corresponding to the breakpoint of a KIF5B-RET fusion), or a fragment thereof, or a sequence substantially identical thereto. In one embodiment, the nucleic acid molecule is complementary to at least a portion of a nucleotide sequence disclosed herein, e.g., is capable of hybridizing under a stringency condition described herein to SEQ ID NO:55 and/or SEQ ID NO:5 or a fragment thereof. In yet other embodiment, the nucleic acid molecule hybridizes to a nucleotide sequence that is complementary to at least a portion of a nucleotide sequence disclosed herein, e.g., is capable of hybridizing under a stringency condition described herein to a nucleotide sequence complementary to SEQ ID NO:55 or SEQ ID NO:5 or a fragment thereof.

[0363] In another embodiment, the KIF5B-RET fusion nucleic acid comprises at least 6, 12, 15, 20, 25, 50, 75, 100 or more nucleotides from exon 16 of KIF5B (e.g., from the nucleotide sequence of KIF5B preceding the fusion junction with RET, e.g., of the KIF5B sequence shown in SEQ ID NO:55), and at least 6, 12, 15, 20, 25, 50, 75, 100 or more nucleotides from exon 12 of RET (e.g., from the nucleotide sequence of RET following the fusion junction with KIF5B, e.g., of the RET sequence shown in SEQ ID NO:5).

[0364] In one embodiment, the KIF5B-RET fusion includes the full sequence or a fragment of the nucleotide sequence shown in SEQ ID NO:53 and SEQ ID NO:100, or a nucleotide sequence substantially identical thereto. In another embodiment, the KIF5B-RET fusion polypeptide includes the full sequence or a fragment of the amino acid sequence shown in SEQ ID NO:54 and SEQ ID NO:101, or an amino acid sequence substantially identical thereto, for example at least 70% or at least 80% or at least 90% identical or even more.

[0365] In other embodiments, the nucleic acid molecule includes a nucleotide sequence encoding a KIF5B-RET fusion polypeptide that includes a fragment of a KIF5B gene and a fragment of a RET gene. In one embodiment, the nucleotide sequence encodes a KIF5B-RET fusion polypeptide that includes e.g., a tyrosine kinase domain or a functional fragment thereof. In yet other embodiments, the nucleic acid molecule includes a nucleotide sequence encoding the amino acid sequence (e.g., a fragment of the amino acid sequence) shown in SEQ ID NO:56 and a nucleotide sequence encoding the amino acid sequence (e.g., a fragment of the amino acid sequence) shown in SEQ ID NO:6, or a fragment of the fusion, or a sequence substantially identical thereto. In one embodiment, the encoded KIF5B-RET fusion polypeptide includes a tyrosine kinase domain or a functional fragment thereof.

[0366] In a related aspect, the invention features nucleic acid constructs that include the KIF5B-RET nucleic acid molecules described herein. In certain embodiments, the nucleic acid molecules are operatively linked to a native or a heterologous regulatory sequence. Also included are vectors and host cells that include the KIF5B-RET nucleic acid molecules described herein, e.g., vectors and host cells suitable for producing the nucleic acid molecules and polypeptides described herein.

[0367] In a related aspect, methods of producing the nucleic acid molecules and polypeptides described herein are also described.

[0368] In another aspect, the invention features nucleic acid molecules that reduce or inhibit the expression of a nucleic acid molecule that encodes a KIF5B-RET fusion described herein. Examples of such nucleic acid molecules include, for example, antisense molecules, ribozymes, RNAi, triple helix molecules that hybridize to a nucleic acid encoding KIF5B-RET, or a transcription regulatory region of KIF5B-RET, and blocks or reduces mRNA expression of KIF5B-RET.

### Nucleic Acid Detection and Capturing Reagents

[0369] The invention also features a nucleic acid molecule, e.g., nucleic acid fragment, suitable as probe, primer, bait or library member that includes, flanks, hybridizes to, which are useful for identifying, or are otherwise based on, the KIF5B-RET fusions described herein. In certain embodiments, the probe, primer or bait molecule is an oligonucleotide that allows capture, detection or isolation of a KIF5B-RET fusion nucleic acid molecule described herein. The oligonucleotide can comprise a nucleotide sequence substantially complementary to a fragment of the KIF5B-RET fusion nucleic acid molecules described herein. The sequence identity between the nucleic acid fragment, e.g., the oligonucleotide, and the target KIF5B-RET sequence need not be exact, so long as the sequences are sufficiently complementary to allow the capture, detection or isolation of the target sequence. In one embodiment, the nucleic acid fragment is a probe or primer that includes an oligonucleotide between about 5 and 25, e.g., between 10 and 20, or 10 and 15 nucleotides in length. In other embodiments, the nucleic acid fragment is a bait that includes an oligonucleotide between about 100 to 300 nucleotides, 130 and 230 nucleotides, or 150 and 200 nucleotides, in length.

[0370] In one embodiment, the nucleic acid fragment can be used to identify or capture, e.g., by hybridization, a KIF5B-RET fusion. For example, the nucleic acid fragment can be a probe, a primer, or a bait, for use in identifying or capturing, e.g., by hybridization, a KIF5B-RET fusion described herein. In one embodiment, the nucleic acid fragment can be useful for identifying or capturing a KIF5B-RET breakpoint, e.g., the nucleotide sequence of: chromosome 10 at nucleotide plus or minus 10, 20, 30, 40, 50, 60, 80, 100, 150 nucleotides and chromosome 10 at nucleotide plus or minus 10, 20, 30, 40 50, 60, 80, 100, 150 nucleotides.

[0371] In one embodiment, the nucleic acid fragment hybridizes to a nucleotide sequence within a chromosomal rearrangement that creates an in-frame fusion of intron 16 of KIF5B with intron 11 of RET. In one embodiment, the nucleic acid fragment hybridizes to a nucleotide sequence in the region In other embodiments, the nucleic acid molecules includes a nucleotide sequence in the region of a nucleotide sequence of chromosome 10 coupled to (e.g., juxtaposed to) nucleotides in the region of a nucleotide sequence Y of chromosome 10. In one embodiment, the nucleic acid fragment hybridizes to a nucleotide sequence that includes a breakpoint, e.g., the nucleotide sequence of: chromosome 10 at nucleotide plus or minus 10, 20, 30, 40 50, 60, 80, 100, 150 or more nucleotides and chromosome 10 at nucleotide plus or minus 10, 20, 30, 40 50, 60, 80, 100, 150 or more nucleotides. For example, the nucleic acid fragment can hybridize to a nucleotide sequence that includes the fusion junction between the KIF5B gene and the RET gene, e.g., a nucleotide sequence that includes a portion of a nucleotide sequence within intron 16 of a KIF5B gene and intron 11 of a RET gene.

[0372] In another embodiment, the nucleic acid fragment hybridizes to a nucleotide sequence that comprises at least 6, 12, 15, 20, 25, 50, 75, 100, 150 or more nucleotides from exon 16 of KIF5B (e.g., from the nucleotide sequence of KIF5B preceding the fusion junction with RET, e.g., of the KIF5B sequence shown in SEQ ID NO:55), and at least 6, 12, 15, 20, 25, 50, 75, 100, 150 or more nucleotides from exon 12 of RET (e.g., from the nucleotide sequence of RET following the fusion junction with KIF5B, e.g., of the RET sequence shown in SEQ ID NO:5).

[0373] The probes or primers described herein can be used, for example, for FISH detection or PCR amplification. In one exemplary embodiment where detection is based on PCR, amplification of the KIF5B-RET fusion junction fusion junction can be performed using a primer or a primer pair, e.g., for amplifying a sequence flanking the fusion junctions described herein, e.g., the mutations or the junction of a chromosomal rearrangement described herein, e.g., KIF5B-RET.

[0374] In one embodiment, a pair of isolated oligonucleotide primers can amplify a region containing or adjacent to a position in the KIF5B-RET fusion. For example, forward primers can be designed to hybridize to a nucleotide sequence within KIF5B genomic or mRNA sequence (e.g., a nucleotide sequence within exon 16 of KIF5B of SEQ ID NO:55, and the reverse primers can be designed to hybridize to a nucleotide sequence of RET (e.g., a nucleotide sequence within exon 12 of RET, of SEQ ID NO:5.

[0375] In another embodiment, the nucleic acid fragments can be used to identify, e.g., by hybridization, a KIF5B-RET fusion. In one embodiment, the nucleic acid fragment hybridizes to a nucleotide sequence that includes a fusion junction between the KIF5B transcript and the RET transcript.

[0376] In other embodiments, the nucleic acid fragment includes a bait that comprises a nucleotide sequence that hybridizes to a KIF5B-RET fusion nucleic acid molecule described herein, and thereby allows the capture or isolation said nucleic acid molecule. In one embodiment, a bait is suitable for solution phase hybridization. In other embodiments, a bait includes a binding entity, e.g., an affinity tag, that allows capture and separation, e.g., by binding to a binding entity, of a hybrid formed by a bait and a nucleic acid hybridized to the bait.

[0377] In other embodiments, the nucleic acid fragment includes a library member comprising a KIF5B-RET nucleic acid molecule described herein. In one embodiment, the library member includes a rearrangement that results in a KIF5B-RET fusion described herein.

[0378] The nucleic acid fragment can be detectably labeled with, e.g., a radiolabel, a fluorescent label, a bioluminescent label, a chemiluminescent label, an enzyme label, a binding pair label, or can include an affinity tag; a tag, or identifier (e.g., an adaptor, barcode or other sequence identifier).

### KIF5B-RET Fusion Polypeptides

[0379] In another embodiment, the KIF5B-RET fusion comprises an amino acid sequence (e.g., a fragment of the amino acid sequence) shown in SEQ ID NO:56 and an amino acid sequence (e.g., a fragment of the amino acid sequence) shown in SEQ ID NO:6, or a fragment of the fusion. In one embodiment, the KIF5B-RET fusion comprises an amino acid sequence substantially identical to the amino acid sequence (e.g., a fragment of the amino acid sequence) shown in SEQ ID NO:56 and the amino acid sequence (e.g., a fragment of the amino acid sequence) shown in SEQ ID NO:6, or a fragment thereof. In one embodiment, the KIF5B-RET fusion comprises an amino acid sequence at least 70%, at least 75%, at least 80%, at least 85%, at least 90%, at least 95%, at least 99%, at least 99.5 or greater, identical to the amino acid sequence (e.g., a fragment of the amino acid sequence) shown in SEQ ID NO:56 and the amino acid sequence (e.g., a fragment of the amino acid sequence) shown in SEQ ID NO:6. In one embodiment, the KIF5B-RET fusion comprises a sequence containing at least 10, 20, 50, 100, 500, 600, 700, 800, 900, 1000, or more amino acids of the amino acid sequence shown in SEQ ID NO:56 and SEQ ID NO:6. In one embodiment, the KIF5B-RET fusion comprises an amino acid sequence containing at least 5, 10, 20, 50, 100, 500, 600, 700, 800, 900, 1000, or more contiguous amino acids of the amino acid sequence shown in SEQ ID NO:56 and at least 5, 10, 20, 50, 100, 500, 600, 700, 800, 900, 1000, or more contiguous amino acids of the amino acid sequence shown in SEQ ID NO:6. In one embodiment, the 5′ KIF5B-3′ RET fusion polypeptide includes a receptor tyrosine kinase domain or a functional fragment thereof. In an embodiment, the 5′KIF5B-3′RET fusion polypeptide comprises sufficient RET and sufficient KIF5B sequence such that it has kinase activity, e.g., has elevated activity or in any event promotes activation of oncogenic signaling pathways.

[0380] In another aspect, the disclosure features a KIF5B-RET fusion polypeptide (e.g., a purified KIF5B-RET fusion polypeptide), a biologically active or antigenic fragment thereof, as well as reagents (e.g., antibody molecules that bind to a KIF5B-RET fusion polypeptide), methods for modulating a KIF5B-RET polypeptide activity and detection of a KIF5B-RET polypeptide.

[0381] In one embodiment, the KIF5B-RET fusion polypeptide has at least one biological activity. In one embodiment, at least one biological activity of the KIF5B-RET fusion polypeptide is reduced or inhibited by an anti-cancer drug, e.g., a KIF5B inhibitor, a RET inhibitor. In one embodiment, at least one biological activity of the KIF5B-RET fusion polypeptide is reduced or inhibited by a RET inhibitor. In one embodiment, at least one biological activity of the KIF5B-RET fusion polypeptide is reduced or inhibited by a KIF5B inhibitor. In one embodiment, at least one biological activity of the KIF5B-RET fusion polypeptide is reduced or inhibited by a RET inhibitor, e.g., CEP-701 and CEP-751; 2-indolinone, e.g., RPI-1; and quinazoline, e.g., ZD6474; or TG101209.

[0382] In yet other embodiments, the KIF5B-RET fusion polypeptide is encoded by a nucleic acid molecule described herein. In one embodiment, the KIF5B-RET fusion polypeptide is encoded by an in-frame fusion of intron 16 of KIF5B with intron 11 of RET (e.g., a sequence on chromosome 10 and a sequence on chromosome 10). In another embodiment, the KIF5B-RET fusion polypeptide includes an amino acid sequence encoded by a nucleotide sequence comprising a fusion junction between the KIF5B transcript and the RET transcript.

[0383] In certain embodiments, the KIF5B-RET fusion polypeptide comprises one or more of encoded exons 1-16 from KIF5B and one or more of encoded exons 12-19 of RET. In certain embodiments, the KIF5B-RET fusion polypeptide comprises at least 1, 2, 3, 4, 5, 6, 7, 8, 9, 10, 11, 12, 13, 14, 15, 16 or more encoded exons of KIF5B and at least at least 1, 2, 3, 4, 5, 6, 7, 8 or more encoded exons of RET. In certain embodiments, the KIF5B-RET fusion polypeptide comprises a fusion of encoded exon 16 from KIF5B and encoded exon 12 from RET (or a fragment thereof). In other embodiments, the fusion comprises at least 1, 2, 3, 4, 5, 6, 7, 8, 9, 10, 11, 12, 13, 14, 15, 16 or more encoded exons of KIF5B; and at least 1, 2, 3, 4, 5, 6, 7, 8 or more encoded exons of RET. In certain embodiments, the KIF5B-RET fusion polypeptide comprises encoded exons 1-16 from KIF5B and exons 12-19 of RET. In certain embodiments, the 5′ KIF5B-3′ RET fusion polypeptide comprises a fusion junction of the sequence of exon 16 from KIF5B and the sequence of exon 12 from RET.

[0384] In certain embodiments, the KIF5B-RET fusion comprises the amino acid sequence corresponding to exon 16 or a fragment thereof from KIF5B, and the amino acid sequence corresponding to exon 12 or a fragment thereof from RET (e.g., as shown in SEQ ID NO:56 and SEQ ID NO:6). In one embodiment, the KIF5B-RET fusion comprises at least 5, 10, 15, 20 or more amino acids from exon 16 of KIF5B (e.g., from the amino acid sequence of KIF5B preceding the fusion junction with RET, e.g., of the KIF5B sequence shown in SEQ ID NO:56), and at least 5, 10, 15, 20 or more amino acids from exon 12 of RET (e.g., from the amino acid sequence of RET following the fusion junction with KIF5B, e.g., of the RET sequence shown in SEQ ID NO:6).

[0385] In one embodiment, the KIF5B-RET fusion polypeptide includes a tyrosine kinase domain or a functional fragment thereof. In a related aspect, the invention features KIF5B-RET fusion polypeptide or fragments operatively linked to heterologous polypeptides to form fusion proteins.

[0386] In another embodiment, the KIF5B-RET fusion polypeptide or fragment is a peptide, e.g., an immunogenic peptide or protein containing a fusion junction described herein. Such immunogenic peptides or proteins can be used to raise antibodies specific to the fusion protein. In other embodiments, such immunogenic peptides or proteins can be used for vaccine preparation. The vaccine preparation can include other components, e.g., an adjuvant.

[0387] In another aspect, the invention features antibody molecules that bind to a KIF5B-RET fusion polypeptide or fragment described herein. In embodiments, the antibody can distinguish wild type RET (or KIF5B) from KIF5B-RET.

### Detection Reagents and Detection of Mutations

[0388] In another aspect, the invention features a detection reagent, e.g., a purified or an isolated preparation thereof. Detection reagents can distinguish a nucleic acid, or protein sequence, having a breakpoint, e.g., a KIF5B-RET breakpoint; from a reference sequence. In one embodiment, the detection reagent detects (e.g., specifically detects) a KIF5B-RET fusion nucleic acid or a polypeptide, e.g., distinguishes a wild type RET or another RET fusion (or KIF5B) from a KIF5B-RET nucleic acid (e.g., as described herein in SEQ ID NO:55 and SEQ ID NO:5); or a KIF5B-RET polypeptide (e.g., as described herein in SEQ ID NO:56 and SEQ ID NO:6).

[0389] Detection reagents, e.g., nucleic acid-based detection reagents, can be used to identify mutations in a target nucleic acid, e.g., DNA, e.g., genomic DNA or cDNA, or RNA. e.g., in a sample, e.g., a sample of nucleic acid derived from a neoplastic or tumor cell, e.g., a melanocytic neoplasm, melanoma or metastatic cell. Detection reagents, e.g., antibody-based detection reagents, can be used to identify mutations in a target protein, e.g., in a sample, e.g., a sample of protein derived from, or produced by, a neoplastic or tumor cell, e.g., a melanocytic neoplasm, melanoma or metastatic cell.

### Method of Treatment

[0390] In a related aspect, a method of inhibiting, reducing, or treating a hyperproliferative disorder, e.g., a neoplasm (including benign, pre-malignant or malignant (e.g., a cancer), in a subject is provided. The method includes administering to the subject a preselected therapeutic agent, e.g., an anti-cancer agent (e.g., a kinase inhibitor), as a single agent, or in combination, in an amount sufficient to reduce, inhibit or treat the activity or expression of KIF5B-RET (e.g., a KIF5B-RET fusion described herein), thereby inhibiting, reducing, or treating the hyperproliferative disorder in the subject.

[0391] In one embodiment, the subject treated has a KIF5B-RET fusion; e.g., the subject has a tumor or cancer harboring a KIF5B-RET fusion. In other embodiments, the subject has been previously identified as having a KIF5B-RET fusion. In yet other embodiments, the subject has been previously identified as being likely or unlikely to respond to treatment with a protein kinase inhibitor, e.g., a subject that has previously participated in a clinical trial. In other embodiments, the subject has been previously identified as being likely or unlikely to respond to treatment with a protein kinase inhibitor, based on the presence of the KIF5B-RET fusion. In one embodiment, the subject is a mammal, e.g., a human. In one embodiment, the subject has, or at risk of having a cancer at any stage of disease. In other embodiments, the subject is a patient, e.g., a cancer patient.

[0392] In certain embodiments, the neoplasm or neoplastic cell is a benign, pre-malignant, malignant (cancer) or metastasis. In certain embodiments, the cancer is a solid tumor, a soft tissue tumor, or a metastatic lesion.

[0393] In one embodiment, the neoplasm or neoplastic cell is a benign, pre-malignant, malignant (cancer) or metastasis. In certain embodiments, the cancer is a solid tumor, a soft tissue tumor, or a metastatic lesion. In one embodiment, the cancer is a carcinoma. In one embodiment, the cancer is an adenocarcinoma. In an embodiment, the cancer is a lung adenocarcinoma. In one embodiment, the cancer is chosen from a lung cancer, a pancreatic cancer, melanoma, a colorectal cancer, an esophageal-gastric cancer, a thyroid cancer, or an adenocarcinoma. In one embodiment, the cancer is thyroid cancer. In one embodiment, the cancer is a papillary thyroid carcinoma. In one embodiment, the cancer is a lung adenocarcinoma. In other embodiment, the lung cancer is chosen from one or more of the following: non-small cell lung cancer (NSCLC), small cell lung cancer (SCLC), squamous cell carcinoma (SCC), adenocarcinoma of the lung, bronchogenic carcinoma, or a combination thereof. In one embodiment, the lung cancer is NSCLC or SCC.

[0394] In one embodiment, the anti-cancer agent is a RET inhibitor. In one embodiment, the anti-cancer agent is a KIF5B inhibitor. In one embodiment, the anti-cancer agent is a kinase inhibitor. In one embodiment, the anti-cancer agent is a RET inhibitor, e.g., CEP-701 and CEP-751; 2-indolinone, e.g., RPI-1; and quinazoline, e.g., ZD6474; or TG101209.

### TP53-NTRK1 Fusions

[0395] In one embodiment, a fusion includes an in-frame fusion of an exon of tumor protein 53 (TP53), e.g., one more exons of TP53 (e.g., one or more of exons 1-8 or exons 1-9 or exons 1-11 or exons 1-12 of TP53) or a fragment thereof, and an exon of neurotrophic tyrosine kinase receptor type 1 (NTRK1), e.g., one or more exons of NTRK1 (e.g., one or more of exons 9-17 of NTRK1) or a fragment thereof. For example, the TP53-NTRK1 fusion can include an in-frame fusion within an intron of TP53 (e.g., intron 8 or intron 9 or intron 11 or intron 12) or a fragment thereof, with an intron of NTRK1 (e.g., intron 8) or a fragment thereof. In one embodiment, the fusion of the TP53-NTRK1 fusion comprises the nucleotide sequence of: chromosome 17 at one or more of a nucleotide (plus or minus 10, 20, 30, 50, 60, 70, 80, 100 or more nucleotides) and chromosome 1 at one or more of a nucleotide (plus or minus 10, 20, 30, 50, 60, 70, 80, 100 or more nucleotides). In one embodiment, the TP53-NTRK1 fusion is a translocation. e.g., a translocation of a portion of chromosome 17 and a portion of chromosome 1.

[0396] In certain embodiments, the TP53-NTRK1 fusion is in a 5′-TP53 to 3′-NTRK1 configuration (also referred to herein as “5′-TP53-NTRK1-3′).” The term “fusion” or “fusion molecule” can refer to a polypeptide or a nucleic acid fusion, depending on the context. It may include a full-length sequence of a fusion or a fragment thereof, e.g., a fusion junction (e.g., a fragment including a portion of TP53 and a portion of NTRK1, e.g., a portion of the TP53-NTRK1 fusion described herein). In one embodiment, the TP53-NTRK1 fusion polypeptide includes a fragment of the amino acid sequence shown in SEQ ID NO:63 and a fragment of the amino acid sequence shown in SEQ ID NO:4, or an amino acid sequence substantially identical thereto. In another embodiment, the TP53-NTRK1 fusion nucleic acid includes a fragment of the nucleotide sequence shown in SEQ ID NO:62 and a fragment of the nucleotide sequence shown in SEQ ID NO:3, or a nucleotide sequence substantially identical thereto. In one embodiment, the TP53-NTRK1 fusion polypeptide comprises sufficient TP53 and sufficient NTRK1 sequence such that the 5′ TP53-3′ NTRK1 fusion has kinase activity, e.g., has elevated activity, e.g., tyrosine kinase activity, as compared with either wild type polypeptide. In any event, the fusion causes activation in the cells harboring it of oncogenic signaling pathways.

[0397] In certain embodiments, the TP53-NTRK1 fusion comprises one or more (or all of) exons 1-8 or exons 1-9 or exons 1-11 or exons 1-12 from TP53 and one or more (or all of) exons 9-17 of NTRK1 (e.g., one or more of the exons shown in SEQ ID NO:62 and SEQ ID NO:3. In another embodiment, the TP53-NTRK1 fusion comprises one or more (or all of) exons 1-8 or exons 1-9 or exons 1-1 or exons 1-12 of TP53 and one or more (or all of) exons 9-17 of NTRK1. In certain embodiments, the TP53-NTRK1 fusion comprises at least 1, 2, 3, 4, 5, 6, 7, 8, 9, 11, 12 or more exons (or encoded exons) from TP53 and at least 1, 2, 3, 4, 5, 6, 7, 8, 9 or more exons (or encoded exons) from NTRK1 (e.g., from the TP53 and NTRK1 sequences shown in SEQ ID NO:62 and SEQ ID NO:63 and SEQ ID NO:3 and SEQ ID NO:4.

[0398] In certain embodiments, the TP53-NTRK1 fusion comprises exons 1-8 or exons 1-9 or exons 1-11 or exons 1-12 or a fragment thereof from TP53, and exons 9-17 or a fragment thereof from NTRK1 (e.g., as shown in SEQ ID NO:62 and SEQ ID NO:3). In one embodiment, the TP53-NTRK1 fusion comprises at least 5, 10, 15, 20, 30, 40, 50 or more amino acids from exons 1-8 or exons 1-9 or exons 1-11 or exons 1-12 of TP53 (e.g., from the amino acid sequence of TP53 as shown in SEQ ID NO:63 (e.g., from the amino acid sequence of TP53 preceding the fusion junction with NTRK1, and at least 5, 10, 15, 20, 30, 40, 50 or more amino acids from exons 9-17 of NTRK1 (e.g., from the amino acid sequence of NTRK1 as shown SEQ ID NO:4). In another embodiment, the TP53-NTRK1 fusion comprises at least 6, 12, 15, 20, 25, 50, 75, 100 or more nucleotides from exons 1-8 or exons 1-9 or exons 1-11 or exons 1-12 of TP53 (e.g., from the nucleotide sequence of TP53 as shown in SEQ ID NO:62 (e.g., from the nucleotide sequence of TP53 preceding the fusion junction with NTRK1); and at least 6, 12, 15, 20, 25, 50, 75, 100 or more nucleotides from exons 9-17 of NTRK1 (e.g., from the nucleotide sequence of NTRK1 as shown in SEQ ID NO:3).

### TP53-NTRK1 Nucleic Acid Molecules

[0399] In one aspect, the invention features a nucleic acid molecule (e.g., an isolated or purified) nucleic acid molecule that includes a fragment of a TP53 gene and a fragment of a NTRK1 gene. In one embodiment, the nucleotide sequence encodes a TP53-NTRK1 fusion polypeptide that includes a tyrosine kinase domain or a functional fragment thereof. In another embodiment, the nucleotide sequence encodes a fragment of the NTRK1 polypeptide including the amino acid sequence of SEQ ID NO:4 or a fragment thereof, or a sequence substantially identical thereto. In other embodiments, the nucleic acid molecule includes a fragment of the TP53 gene encoding the amino acid sequence of SEQ ID NO:63 or a fragment thereof, or a sequence substantially identical thereto. In yet other embodiments, the nucleic acid molecule includes a nucleotide sequence encoding the amino acid sequence shown in SEQ ID NO:63, or a fragment thereof, and the amino acid sequence shown in SEQ ID NO:4 or a fragment thereof, or a sequence substantially identical thereto.

[0400] In one embodiment, the nucleic acid molecule includes a fusion, e.g., an in-frame fusion, between an intron of TP53 (e.g., intron 8 or intron 9 or intron 11 or intron 12, or a fragment thereof), and an intron of NTRK1 (e.g., intron 8, or a fragment thereof). The TP53-NTRK1 fusion can comprise a fusion of the nucleotide sequence of: chromosome 17 at one or more of a nucleotide (plus or minus 10, 20, 30, 50, 60, 70, 80, 100 nucleotides) and chromosome 1 at one or more of a nucleotide (plus or minus 10, 20, 30, 50, 60, 70, 80, 100 nucleotides), or a fragment thereof. In one embodiment, the TP53-NTRK1 fusion comprises a fusion of the nucleotide sequence of: chromosome 17 at one or more of a nucleotide (plus or minus 10, 20, 30, 50, 60, 70, 80, 100 nucleotides) and chromosome 1 at one or more of a nucleotide (plus or minus 10, 20, 30, 50, 60, 70, 80, 100 nucleotides), or a fragment thereof.

[0401] In another embodiment, the TP53-NTRK1 fusion comprises a nucleotide sequence (e.g., a fragment of a nucleotide sequence) shown in SEQ ID NO:62 and a nucleotide sequence (e.g., a fragment of a nucleotide sequence) shown in SEQ ID NO:3, or a fragment of the fusion. In one embodiment, the TP53-NTRK1 fusion comprises a nucleotide sequence substantially identical to the nucleotide sequence (e.g., a fragment of a nucleotide sequence) shown in SEQ ID NO:62 and the nucleotide sequence (e.g., a fragment of a nucleotide sequence) shown SEQ ID NO:3, or a fragment of the fusion. In one embodiment, the TP53-NTRK1 fusion comprises a nucleotide sequence at least 70%, at least 75%, at least 80%, at least 85%, at least 90%, at least 95%, at least 99%, at least 99.5 or greater, identical to the nucleotide sequence (e.g., a fragment of a nucleotide sequence) shown in SEQ ID NO:62 and to the nucleotide sequence (e.g., a fragment of a nucleotide sequence) shown in SEQ ID NO:3. In one embodiment, the TP53-NTRK1 fusion comprises a nucleotide sequence containing at least 25, 50, 100, 150, 200, 500, 1000, 1500, 2000, 2500, 3000, or more nucleotides of the nucleotide sequence shown in SEQ ID NO:62 and a nucleotide sequence containing at least 25, 50, 100, 150, 200, 500, 1000, 1500, 2000, 2500, 3000, or more nucleotides of the nucleotide sequence shown in SEQ ID NO:3. In one embodiment, the TP53-NTRK1 fusion comprises a nucleotide sequence containing at least 25, 50, 100, 150, 200, 500, 1000, 1500, 2000, 2500, 3000, or more contiguous nucleotides of the nucleotide sequence shown in 155 SEQ ID NO:62 and a nucleotide sequence containing at least 25, 50, 100, 150, 200, 500, 1000, 1500, 2000, 2500, 3000, or more nucleotides of the nucleotide sequence shown in SEQ ID NO:3.

[0402] In another embodiment, the nucleic acid molecule includes a fusion, e.g., an in-frame fusion, of at least 1, 2, 3, 4, 5, 6, 7, 8, 9, 11, 12 or more exons of TP53 or a fragment thereof (e.g., one or more of exons 1-8 or exons 1-9 or exons 1-11 or exons 1-12 of TP53 or a fragment thereof), and at least 1, 2, 3, 4, 5, 6, 7, 8, 9 or more exons of NTRK1 or a fragment thereof (e.g., one or more of exons 9-17 of NTRK1 or a fragment thereof). In yet other embodiments, the nucleic acid molecule includes a fragment the nucleotide sequence shown in SEQ ID NO:62 and a fragment of the nucleotide sequence shown in SEQ ID NO:3 or a fragment of the fusion, or a sequence substantially identical thereto.

[0403] In one embodiment, the nucleic acid molecule is complementary to at least a portion of a nucleotide sequence disclosed herein, e.g., is capable of hybridizing under a stringency condition described herein to SEQ ID NO:62 and/or SEQ ID NO:3, or a fragment thereof. In yet another embodiment, the nucleic acid molecule hybridizes to a nucleotide sequence that is complementary to at least a portion of a nucleotide sequence disclosed herein, e.g., is capable of hybridizing under a stringency condition to a nucleotide sequence complementary to SEQ ID NO:62 and/or SEQ ID NO:3, or a fragment thereof. The nucleotide sequence of a cDNA encoding an exemplary 5′ TP53-3′ NTRK1 fusion is shown in at least exon 8 or exon 9 or exon 11 or exon 12 (e.g., exons 1-8 or exons 1-9 or exons 1-11 or exons 1-12) of SEQ ID NO:62 and at least exon 9 (e.g., exons 9-17) of SEQ ID NO:3, and the predicted amino acid sequence is shown in the corresponding encoded exons of SEQ ID NO:63 and the corresponding encoded exons of SEQ ID NO:4, respectively.

[0404] In an embodiment the TP53-NTRK1 nucleic acid molecule comprises sufficient TP53 and sufficient NTRK1 sequence such that the encoded 5′ TP53-3′ NTRK1 fusion has kinase activity, e.g., has elevated activity. In certain embodiments, the 5′ TP53-3′ NTRK1 fusion comprises exons 1-8 or exons 1-9 or exons 1-11 or exons 1-12 from TP53 and exons 9-17 from NTRK1. In certain embodiments, the TP53-NTRK1 fusion comprises at least 1, 2, 3, 4, 5, 6, 7, 8, 9, 11, 12 or more exons from TP53 and at least at least 1, 2, 3, 4, 5, 6, 7, 8, 9 or more exons of NTRK1. In certain embodiments, the TP53-NTRK1 fusion comprises a fusion of exon 8 or exon 9 or exon 11 or exon 12 from TP53 and exon 9 from NTRK1. In another embodiment, the TP53-NTRK1 fusion comprises 1, 2, 3, 4, 5, 6, 7, 8, 9, 11, 12 or more exons of TP53; and at least 1, 2, 3, 4, 5, 6, 7, 8, 9 or more exons of NTRK1.

[0405] In one embodiment, the nucleic acid molecule includes a nucleotide sequence that has an in-frame fusion of intron 8 or intron 9 or intron 11 or intron 12 of TP53 (e.g., NM_{—}001126113) with intron 8 of NTRK1 (e.g., NM_{—}002529). In another embodiment, the nucleic acid molecule includes a nucleotide sequence that includes a breakpoint. For example, the nucleic acid molecule includes a nucleotide sequence that includes the fusion junction between the TP53 gene and the NTRK1 gene, e.g., the breakpoint between intron 8 or intron 9 or intron 11 or intron 12 of TP53 and intron 8 of NTRK1. In other embodiments, the nucleic acid molecules includes a nucleotide sequence of one or more of nucleotide of chromosome 17 coupled to (e.g., directly or indirectly juxtaposed to) one or more of nucleotide of chromosome 1. In one embodiment, the nucleic acid molecule includes the nucleotide sequence of: chromosome 17 at one or more of a nucleotide plus or minus 10, 20, 30, 40 50, 60, 80, 100, 150 nucleotides and chromosome 1 at one or more of a nucleotide plus or minus 10, 20, 30, 40 50, 60, 80, 100, 150 nucleotides (corresponding to the breakpoint of a TP53-NTRK1 fusion), or a fragment thereof, or a sequence substantially identical thereto. In one embodiment, the nucleic acid molecule is complementary to at least a portion of a nucleotide sequence disclosed herein, e.g., is capable of hybridizing under a stringency condition described herein to SEQ ID NO:62 and/or SEQ ID NO:3 or a fragment thereof. In yet other embodiment, the nucleic acid molecule hybridizes to a nucleotide sequence that is complementary to at least a portion of a nucleotide sequence disclosed herein, e.g., is capable of hybridizing under a stringency condition described herein to a nucleotide sequence complementary to SEQ ID NO:62 or SEQ ID NO:3 or a fragment thereof.

[0406] In another embodiment, the TP53-NTRK1 fusion nucleic acid comprises at least 6, 12, 15, 20, 25, 50, 75, 100 or more nucleotides from exon 8 or exon 9 or exon 11 or exon 12 of TP53 (e.g., from the nucleotide sequence of TP53 preceding the fusion junction with NTRK1, e.g., of the TP53 sequence shown in SEQ ID NO:62), and at least 6, 12, 15, 20, 25, 50, 75, 100 or more nucleotides from exon 9 of NTRK1 (e.g., from the nucleotide sequence of NTRK1 following the fusion junction with TP53, e.g., of the NTRK1 sequence shown in SEQ ID NO:3).

[0407] In other embodiments, the nucleic acid molecule includes a nucleotide sequence encoding a TP53-NTRK1 fusion polypeptide that includes a fragment of a TP53 gene and a fragment of a NTRK1 gene. In one embodiment, the nucleotide sequence encodes a TP53-NTRK1 fusion polypeptide that includes e.g., a tyrosine kinase domain or a functional fragment thereof. In yet other embodiments, the nucleic acid molecule includes a nucleotide sequence encoding the amino acid sequence (e.g., a fragment of the amino acid sequence) shown in SEQ ID NO:63 and a nucleotide sequence encoding the amino acid sequence (e.g., a fragment of the amino acid sequence) shown in SEQ ID NO:4, or a fragment of the fusion, or a sequence substantially identical thereto. In one embodiment, the encoded TP53-NTRK1 fusion polypeptide includes a tyrosine kinase domain or a functional fragment thereof.

[0408] In one embodiment, the TP53-NTRK1 fusion includes the full sequence or a fragment of the nucleotide sequence shown in SEQ ID NO:57, SEQ ID NO:59, SEQ ID NO:60, SEQ ID NO:61, SEQ ID NO: 106, SEQ ID NO: 107, SEQ ID NO: 108 and SEQ ID NO: 109, or a nucleotide sequence substantially identical thereto. In another embodiment, the TP53-NTRK11 fusion polypeptide includes the full sequence or a fragment of the amino acid sequence shown in SEQ ID NO:58, or an amino acid sequence substantially identical thereto, for example at least 70% or at least 80% or at least 90% identical or even more.

[0409] In a related aspect, the invention features nucleic acid constructs that include the TP53-NTRK1 nucleic acid molecules described herein. In certain embodiments, the nucleic acid molecules are operatively linked to a native or a heterologous regulatory sequence. Also included are vectors and host cells that include the TP53-NTRK1 nucleic acid molecules described herein, e.g., vectors and host cells suitable for producing the nucleic acid molecules and polypeptides described herein.

[0410] In a related aspect, methods of producing the nucleic acid molecules and polypeptides described herein are also described.

[0411] In another aspect, the invention features nucleic acid molecules that reduce or inhibit the expression of a nucleic acid molecule that encodes a TP53-NTRK1 fusion described herein. Examples of such nucleic acid molecules include, for example, antisense molecules, ribozymes, RNAi, triple helix molecules that hybridize to a nucleic acid encoding TP53-NTRK1, or a transcription regulatory region of TP53-NTRK1, and blocks or reduces mRNA expression of TP53-NTRK1.

### Nucleic Acid Detection and Capturing Reagents

[0412] The invention also features a nucleic acid molecule, e.g., nucleic acid fragment, suitable as probe, primer, bait or library member that includes, flanks, hybridizes to, which are useful for identifying, or are otherwise based on, the TP53-NTRK1 fusions described herein. In certain embodiments, the probe, primer or bait molecule is an oligonucleotide that allows capture, detection or isolation of a TP53-NTRK1 fusion nucleic acid molecule described herein. The oligonucleotide can comprise a nucleotide sequence substantially complementary to a fragment of the TP53-NTRK1 fusion nucleic acid molecules described herein. The sequence identity between the nucleic acid fragment, e.g., the oligonucleotide, and the target TP53-NTRK1 sequence need not be exact, so long as the sequences are sufficiently complementary to allow the capture, detection or isolation of the target sequence. In one embodiment, the nucleic acid fragment is a probe or primer that includes an oligonucleotide between about 5 and 25, e.g., between 10 and 20, or 10 and 15 nucleotides in length. In other embodiments, the nucleic acid fragment is a bait that includes an oligonucleotide between about 100 to 300 nucleotides, 130 and 230 nucleotides, or 150 and 200 nucleotides, in length.

[0413] In one embodiment, the nucleic acid fragment can be used to identify or capture, e.g., by hybridization, a TP53-NTRK1 fusion. For example, the nucleic acid fragment can be a probe, a primer, or a bait, for use in identifying or capturing, e.g., by hybridization, a TP53-NTRK11 fusion described herein. In one embodiment, the nucleic acid fragment can be useful for identifying or capturing a TP53-NTRK1 breakpoint, e.g., the nucleotide sequence of: chromosome 17 at nucleotide plus or minus 10, 20, 30, 40, 50, 60, 80, 100, 150 nucleotides and chromosome 1 at nucleotide plus or minus 10, 20, 30, 40 50, 60, 80, 100, 150 nucleotides.

[0414] In one embodiment, the nucleic acid fragment hybridizes to a nucleotide sequence within a chromosomal rearrangement that creates an in-frame fusion of intron 8 or intron 9 or intron 11 or intron 12 of TP53 with intron 8 of NTRK1. In one embodiment, the nucleic acid fragment hybridizes to a nucleotide sequence in the region In other embodiments, the nucleic acid molecules includes a nucleotide sequence in the region of a nucleotide sequence of chromosome 17 coupled to (e.g., juxtaposed to) nucleotides in the region of a nucleotide sequence Y of chromosome 17. In one embodiment, the nucleic acid fragment hybridizes to a nucleotide sequence that includes a breakpoint, e.g., the nucleotide sequence of: chromosome 17 at nucleotide plus or minus 10, 20, 30, 40 50, 60, 80, 100, 150 or more nucleotides and chromosome 1 at nucleotide plus or minus 10, 20, 30, 40 50, 60, 80, 100, 150 or more nucleotides. For example, the nucleic acid fragment can hybridize to a nucleotide sequence that includes the fusion junction between the TP53 gene and the NTRK1 gene, e.g., a nucleotide sequence that includes a portion of a nucleotide sequence within intron 8 or intron 9 or intron 11 or intron 12 of a TP53 gene and intron 8 of a NTRK1 gene.

[0415] In another embodiment, the nucleic acid fragment hybridizes to a nucleotide sequence that comprises at least 6, 12, 15, 20, 25, 50, 75, 100, 150 or more nucleotides from exon 8 or exon 9 or exon 11 or exon 12 of TP53 (e.g., from the nucleotide sequence of TP53 preceding the fusion junction with NTRK1, e.g., of the TP53 sequence shown in SEQ ID NO:62), and at least 6, 12, 15, 20, 25, 50, 75, 100, 150 or more nucleotides from exon 9 of NTRK1 (e.g., from the nucleotide sequence of NTRK1 following the fusion junction with TP53, e.g., of the NTRK1 sequence shown in SEQ ID NO:3).

[0416] The probes or primers described herein can be used, for example, for FISH detection or PCR amplification. In one exemplary embodiment where detection is based on PCR, amplification of the TP53-NTRK1 fusion junction fusion junction can be performed using a primer or a primer pair, e.g., for amplifying a sequence flanking the fusion junctions described herein, e.g., the mutations or the junction of a chromosomal rearrangement described herein, e.g., TP53-NTRK1.

[0417] In one embodiment, a pair of isolated oligonucleotide primers can amplify a region containing or adjacent to a position in the TP53-NTRK1 fusion. For example, forward primers can be designed to hybridize to a nucleotide sequence within TP53 genomic or mRNA sequence (e.g., a nucleotide sequence within exon 8 or exon 9 or exon 11 or exon 12 of TP53 of SEQ ID NO:62, and the reverse primers can be designed to hybridize to a nucleotide sequence of NTRK1 (e.g., a nucleotide sequence within exon 9 of NTRK1, of SEQ ID NO:3.

[0418] In another embodiment, the nucleic acid fragments can be used to identify. e.g., by hybridization, a TP53-NTRK1 fusion. In one embodiment, the nucleic acid fragment hybridizes to a nucleotide sequence that includes a fusion junction between the TP53 transcript and the NTRK1 transcript.

[0419] In other embodiments, the nucleic acid fragment includes a bait that comprises a nucleotide sequence that hybridizes to a TP53-NTRK1 fusion nucleic acid molecule described herein, and thereby allows the capture or isolation said nucleic acid molecule. In one embodiment, a bait is suitable for solution phase hybridization. In other embodiments, a bait includes a binding entity, e.g., an affinity tag, that allows capture and separation, e.g., by binding to a binding entity, of a hybrid formed by a bait and a nucleic acid hybridized to the bait.

[0420] In other embodiments, the nucleic acid fragment includes a library member comprising a TP53-NTRK1 nucleic acid molecule described herein. In one embodiment, the library member includes a rearrangement that results in a TP53-NTRK1 fusion described herein.

[0421] The nucleic acid fragment can be detectably labeled with, e.g., a radiolabel, a fluorescent label, a bioluminescent label, a chemiluminescent label, an enzyme label, a binding pair label, or can include an affinity tag; a tag, or identifier (e.g., an adaptor, barcode or other sequence identifier).

### TP53-NTRK1 Fusion Polypeptides

[0422] In another embodiment, the TP53-NTRK1 fusion comprises an amino acid sequence (e.g., a fragment of the amino acid sequence) shown in SEQ ID NO:63 and an amino acid sequence (e.g., a fragment of the amino acid sequence) shown in SEQ ID NO:4, or a fragment of the fusion. In one embodiment, the TP53-NTRK1 fusion comprises an amino acid sequence substantially identical to the amino acid sequence (e.g., a fragment of the amino acid sequence) shown in SEQ ID NO:63 and the amino acid sequence (e.g., a fragment of the amino acid sequence) shown in SEQ ID NO:4, or a fragment thereof. In one embodiment, the TP53-NTRK1 fusion comprises an amino acid sequence at least 70%, at least 75%, at least 80%, at least 85%, at least 90%, at least 95%, at least 99%, at least 99.5 or greater, identical to the amino acid sequence (e.g., a fragment of the amino acid sequence) shown in SEQ ID NO:63 and the amino acid sequence (e.g., a fragment of the amino acid sequence) shown in SEQ ID NO:4. In one embodiment, the TP53-NTRK1 fusion comprises a sequence containing at least 10, 20, 50, 100, 500, 600, 700, 800, 900, 1000, or more amino acids of the amino acid sequence shown in SEQ ID NO:63 and SEQ ID NO:4. In one embodiment, the TP53-NTRK1 fusion comprises an amino acid sequence containing at least 5, 10, 20, 50, 100, 500, 600, 700, 800, 900, 1000, or more contiguous amino acids of the amino acid sequence shown in 156 SEQ ID NO:63 and at least 5, 10, 20, 50, 100, 500, 600, 700, 800, 900, 1000, or more contiguous amino acids of the amino acid sequence shown in SEQ ID NO:4. In one embodiment, the 5′ TP53-3′ NTRK1 fusion polypeptide includes a receptor tyrosine kinase domain or a functional fragment thereof. In an embodiment, the 5′TP53-3′NTRK1 fusion polypeptide comprises sufficient NTRK1 and sufficient TP53 sequence such that it has kinase activity, e.g., has elevated activity.

[0423] In another aspect, the invention features a TP53-NTRK1 fusion polypeptide (e.g., a purified TP53-NTRK1 fusion polypeptide), a biologically active or antigenic fragment thereof, as well as reagents (e.g., antibody molecules that bind to a TP53-NTRK1 fusion polypeptide), methods for modulating a TP53-NTRK1 polypeptide activity and detection of a TP53-NTRK1 polypeptide.

[0424] In one embodiment, the TP53-NTRK1 fusion polypeptide has at least one biological activity. In one embodiment, at least one biological activity of the TP53-NTRK1 fusion polypeptide is reduced or inhibited by an anti-cancer drug, e.g., a TP53 inhibitor, a NTRK1 inhibitor. In one embodiment, at least one biological activity of the TP53-NTRK1 fusion polypeptide is reduced or inhibited by a NTRK1 inhibitor. In one embodiment, at least one biological activity of the TP53-NTRK1 fusion polypeptide is reduced or inhibited by a TP53 inhibitor. In one embodiment, at least one biological activity of the TP53-NTRK1 fusion polypeptide is reduced or inhibited by a NTRK1 inhibitor, e.g., lestaurtinib (CEP-701); AZ-23; indenopyrrolocarbazole 12a; oxindole 3; isothiazole 5n; thiazole 20h.

[0425] In yet other embodiments, the TP53-NTRK1 fusion polypeptide is encoded by a nucleic acid molecule described herein. In one embodiment, the TP53-NTRK1 fusion polypeptide is encoded by an in-frame fusion of intron 8 or intron 9 or intron 11 or intron 12 of TP53 with intron 8 of NTRK1 (e.g., a sequence on chromosome 17 and a sequence on chromosome 1). In another embodiment, the TP53-NTRK1 fusion polypeptide includes an amino acid sequence encoded by a nucleotide sequence comprising a fusion junction between the TP53 transcript and the NTRK1 transcript.

[0426] In certain embodiments, the TP53-NTRK1 fusion polypeptide comprises one or more of encoded exons 1-8 or exons 1-9 or exons 1-11 or exons 1-12 from TP53 and one or more of encoded exons 9-17 of NTRK1. In certain embodiments, the TP53-NTRK1 fusion polypeptide comprises at least 1, 2, 3, 4, 5, 6, 7, 8, 9, 11, 12 or more encoded exons of TP53 and at least at least 1, 2, 3, 4, 5, 6, 7, 8, 9 or more encoded exons of NTRK1. In certain embodiments, the TP53-NTRK1 fusion polypeptide comprises a fusion of encoded exon 8 or exon 9 or exon 11 or exon 12 from TP53 and encoded exon 9 from NTRK1 (or a fragment thereof). In other embodiments, the fusion comprises at least 1, 2, 3, 4, 5, 6, 7, 8, 9, 11, 12 or more encoded exons of TP53; and at least 1, 2, 3, 4, 5, 6, 7, 8, 9 or more encoded exons of NTRK1. In certain embodiments, the TP53-NTRK1 fusion polypeptide comprises encoded exons 1-8 or exons 1-9 or exons 1-11 or exons 1-12 from TP53 and exons 9-17 of NTRK1. In certain embodiments, the 5′ TP53-3′ NTRK1 fusion polypeptide comprises a fusion junction of the sequence of exon 8 or exon 9 or exon 11 or exon 12 from TP53 and the sequence of exon 9 from NTRK1.

[0427] In certain embodiments, the TP53-NTRK1 fusion comprises the amino acid sequence corresponding to exon 8 or exon 9 or exon 11 or exon 12 or a fragment thereof from TP53, and the amino acid sequence corresponding to exon 9 or a fragment thereof from NTRK1 (e.g., as shown in SEQ ID NO:63 and SEQ ID NO:4). In one embodiment, the TP53-NTRK1 fusion comprises at least 5, 10, 15, 20 or more amino acids from exon 8 or exon 9 or exon 11 or exon 12 of TP53 (e.g., from the amino acid sequence of TP53 preceding the fusion junction with NTRK1, e.g., of the TP53 sequence shown in SEQ ID NO:63), and at least 5, 10, 15, 20 or more amino acids from exon 9 of NTRK1 (e.g., from the amino acid sequence of NTRK1 following the fusion junction with TP53, e.g., of the NTRK1 sequence shown in SEQ ID NO:4).

[0428] In one embodiment, the TP53-NTRK1 fusion polypeptide includes a tyrosine kinase domain or a functional fragment thereof. In a related aspect, the invention features TP53-NTRK1 fusion polypeptide or fragments operatively linked to heterologous polypeptides to form fusion proteins.

[0429] In another embodiment, the TP53-NTRK1 fusion polypeptide or fragment is a peptide, e.g., an immunogenic peptide or protein, containing a fusion junction described herein. Such immunogenic peptides or proteins can be used to raise antibodies specific to the fusion protein. In other embodiments, such immunogenic peptides or proteins can be used for vaccine preparation. The vaccine preparation can include other components, e.g., an adjuvant.

[0430] In another aspect, the invention features antibody molecules that bind to a TP53-NTRK fusion polypeptide or fragment described herein. In embodiments, the antibody can distinguish wild type NTRK1 (or TP53) from TP53-NTRK1.

### Detection Reagents and Detection of Mutations

[0431] In another aspect, the invention features a detection reagent, e.g., a purified or an isolated preparation thereof. Detection reagents can distinguish a nucleic acid, or protein sequence, having a breakpoint, e.g., a TP53-NTRK1 breakpoint; from a reference sequence. In one embodiment, the detection reagent detects (e.g., specifically detects) a TP53-NTRK1 fusion nucleic acid or a polypeptide, e.g., distinguishes a wild type NTRK1 or another NTRK1 fusion (or TP53) from a TP53-NTRK1 nucleic acid (e.g., as described herein in SEQ ID NO:62 and SEQ ID NO:3); or a TP53-NTRK1 polypeptide (e.g., as described herein in SEQ ID NO:63 and SEQ ID NO:4).

[0432] Detection reagents, e.g., nucleic acid-based detection reagents, can be used to identify mutations in a target nucleic acid, e.g., DNA, e.g., genomic DNA or cDNA, or RNA, e.g., in a sample, e.g., a sample of nucleic acid derived from a neoplastic or tumor cell, e.g., a melanocytic neoplasm, melanoma or metastatic cell. Detection reagents, e.g., antibody-based detection reagents, can be used to identify mutations in a target protein, e.g., in a sample, e.g., a sample of protein derived from, or produced by, a neoplastic or tumor cell, e.g., a melanocytic neoplasm, melanoma or metastatic cell.

### Method of Treatment

[0433] In a related aspect, a method of inhibiting, reducing, or treating a hyperproliferative disorder, e.g., a neoplasm (including benign, pre-malignant or malignant (e.g., a cancer), in a subject is provided. The method includes administering to the subject a preselected therapeutic agent, e.g., an anti-cancer agent (e.g., a kinase inhibitor), as a single agent, or in combination, in an amount sufficient to reduce, inhibit or treat the activity or expression of TP53-NTRK1 (e.g., a TP53-NTRK1 fusion described herein), thereby inhibiting, reducing, or treating the hyperproliferative disorder in the subject.

[0434] In one embodiment, the subject treated has a TP53-NTRK1 fusion; e.g., the subject has a tumor or cancer harboring a TP53-NTRK1 fusion. In other embodiments, the subject has been previously identified as having a TP53-NTRK1 fusion. In yet other embodiments, the subject has been previously identified as being likely or unlikely to respond to treatment with a protein kinase inhibitor, e.g., a subject that has previously participated in a clinical trial. In other embodiments, the subject has been previously identified as being likely or unlikely to respond to treatment with a protein kinase inhibitor, based on the presence of the TP53-NTRK1 fusion. In one embodiment, the subject is a mammal, e.g., a human. In one embodiment, the subject has, or at risk of having a cancer at any stage of disease. In other embodiments, the subject is a patient, e.g., a cancer patient.

[0435] In certain embodiments, the neoplasm or neoplastic cell is a benign, pre-malignant, malignant (cancer) or metastasis. In certain embodiments, the cancer is a solid tumor, a soft tissue tumor, or a metastatic lesion.

[0436] In one embodiment, the neoplasm or neoplastic cell is a benign, pre-malignant, malignant (cancer) or metastasis. In certain embodiments, the cancer is a solid tumor, a soft tissue tumor, or a metastatic lesion. In one embodiment, the cancer is a carcinoma. In one embodiment, the cancer is an adenocarcinoma. In an embodiment, the cancer is a lung adenocarcinoma. In one embodiment, the cancer is chosen from a lung cancer, a pancreatic cancer, melanoma, a colorectal cancer, an esophageal-gastric cancer, a thyroid cancer, or an adenocarcinoma. In one embodiment, the cancer is a thyroid cancer. In one embodiment, the cancer is a papillary thyroid carcinoma. In one embodiment, the cancer is a lung adenocarcinoma. In other embodiment, the lung cancer is chosen from one or more of the following: non-small cell lung cancer (NSCLC), small cell lung cancer (SCLC), squamous cell carcinoma (SCC), adenocarcinoma of the lung, bronchogenic carcinoma, or a combination thereof. In one embodiment, the lung cancer is NSCLC or SCC.

[0437] In one embodiment, the anti-cancer agent is a NTRK1 inhibitor. In one embodiment, the anti-cancer agent is a TP53 inhibitor. In one embodiment, the anti-cancer agent is a kinase inhibitor. In one embodiment, the anti-cancer agent is a NTRK1 inhibitor, e.g., lestaurtinib (CEP-701); AZ-23; indenopyrrolocarboazole 12a; oxindole 3; isothiazole 5n; thiazole 20h.

### CEP89-BRAF Fusions

[0438] In one embodiment, a fusion includes an in-frame fusion of an exon of centrosomal protein 89 kDa (CEP89), e.g., one more exons of CEP89 (e.g., one or more of exons 1-16 of CEP89) or a fragment thereof, and an exon of v-raf murine sarcoma viral oncogene homolog B1 (BRAF), e.g., one or more exons of a BRAF (e.g., one or more of exons 9-18 of BRAF) or a fragment thereof. For example, the CEP89-BRAF fusion can include an in-frame fusion within an intron of CEP89 (e.g., intron 16) or a fragment thereof, with an intron of BRAF (e.g., intron 8) or a fragment thereof. In one embodiment, the fusion of the CEP89-BRAF fusion comprises the nucleotide sequence of: chromosome 19 at one or more of a nucleotide (plus or minus 10, 20, 30, 50, 60, 70, 80, 100 or more nucleotides) and chromosome 7 at one or more of a nucleotide (plus or minus 10, 20, 30, 50, 60, 70, 80, 100 or more nucleotides). In one embodiment, the CEP89-BRAF fusion is a translocation, e.g., a translocation of a portion of chromosome 19 and a portion of chromosome 7.

[0439] In certain embodiments, the CEP89-BRAF fusion is in a 5′-CEP89 to 3′-BRAF configuration (also referred to herein as “5′-CEP89-BRAF-3′).” The term “fusion” or “fusion molecule” can refer to a polypeptide or a nucleic acid fusion, depending on the context. It may include a full-length sequence of a fusion or a fragment thereof, e.g., a fusion junction (e.g., a fragment including a portion of CEP89 and a portion of BRAF, e.g., a portion of the CEP89-BRAF fusion described herein). In one embodiment, the CEP89-BRAF fusion polypeptide includes a fragment of the amino acid sequence shown in SEQ ID NO:52 and a fragment of the amino acid sequence shown in SEQ ID NO:2, or an amino acid sequence substantially identical thereto. In another embodiment, the CEP89-BRAF fusion nucleic acid includes a fragment of the nucleotide sequence shown in SEQ ID NO:51 and a fragment of the nucleotide sequence shown in SEQ ID NO: 1, or a nucleotide sequence substantially identical thereto. In one embodiment, the CEP89-BRAF fusion polypeptide comprises sufficient CEP89 and sufficient BRAF sequence such that the 5′ CEP89-3′ BRAF fusion has kinase activity, e.g., has elevated activity, e.g., tyrosine kinase activity, as compared with either wild type polypeptide. In any event, the fusion causes activation in the cells harboring it of oncogenic signaling pathways.

[0440] In certain embodiments, the CEP89-BRAF fusion comprises one or more (or all of) exons 1-16 from CEP89 and one or more (or all of) exons 9-18 of BRAF (e.g., one or more of the exons shown in SEQ ID NO:51 and SEQ ID NO: 1. In another embodiment, the CEP89-BRAF fusion comprises one or more (or all of) exons 1-16 of CEP89 and one or more (or all of) exons 9-18 of BRAF. In certain embodiments, the CEP89-BRAF fusion comprises at least 1, 2, 3, 4, 5, 6, 7, 8, 9, 10, 11, 12, 13, 14, 15, 16 or more exons (or encoded exons) from CEP89 and at least 1, 2, 3, 4, 5, 6, 7, 8, 9, 10 or more exons (or encoded exons) from BRAF (e.g., from the CEP89 and BRAF sequences shown in SEQ ID NO:51 and SEQ ID NO:52 and SEQ ID NO:1 and SEQ ID NO:2.

[0441] In certain embodiments, the CEP89-BRAF fusion comprises exons 1-16 or a fragment thereof from CEP89, and exons 9-18 or a fragment thereof from BRAF (e.g., as shown in SEQ ID NO:51 and SEQ ID NO:1). In one embodiment, the CEP89-BRAF fusion comprises at least 5, 10, 15, 20, 30, 40, 50 or more amino acids from exons 1-16 of CEP89 (e.g., from the amino acid sequence of CEP89 as shown in SEQ ID NO:52 (e.g., from the amino acid sequence of CEP89 preceding the fusion junction with BRAF, and at least 5, 10, 15, 20, 30, 40, 50 or more amino acids from exons 9-18 of BRAF (e.g., from the amino acid sequence of BRAF as shown in SEQ ID NO:2). In another embodiment, the CEP89-BRAF fusion comprises at least 6, 12, 15, 20, 25, 50, 75, 100 or more nucleotides from exons 1-16 of CEP89 (e.g., from the nucleotide sequence of CEP89 as shown in SEQ ID NO:51 (e.g., from the nucleotide sequence of CEP89 preceding the fusion junction with BRAF); and at least 6, 12, 15, 20, 25, 50, 75, 100 or more nucleotides from exons 9-18 of BRAF (e.g., from the nucleotide sequence of BRAF as shown in SEQ ID NO:1).

### CEP89-BRAF Nucleic Acid Molecules

[0442] In one aspect, the invention features a nucleic acid molecule (e.g., an isolated or purified) nucleic acid molecule that includes a fragment of a CEP89 gene and a fragment of a BRAF gene. In one embodiment, the nucleotide sequence encodes a CEP89-BRAF fusion polypeptide that includes a tyrosine kinase domain or a functional fragment thereof. In another embodiment, the nucleotide sequence encodes a fragment of the BRAF polypeptide including the amino acid sequence of SEQ ID NO:2 or a fragment thereof, or a sequence substantially identical thereto. In other embodiments, the nucleic acid molecule includes a fragment of the CEP89 gene encoding the amino acid sequence of SEQ ID NO:52 or a fragment thereof, or a sequence substantially identical thereto. In yet other embodiments, the nucleic acid molecule includes a nucleotide sequence encoding the amino acid sequence shown in SEQ ID NO:52, or a fragment thereof, and the amino acid sequence shown in SEQ ID NO:2 or a fragment thereof, or a sequence substantially identical thereto.

[0443] In one embodiment, the nucleic acid molecule includes a fusion, e.g., an in-frame fusion, between an intron of CEP89 (e.g., intron 16, or a fragment thereof), and an intron of BRAF (e.g., intron 8, or a fragment thereof). The CEP89-BRAF fusion can comprise a fusion of the nucleotide sequence of: chromosome 19 at one or more of a nucleotide (plus or minus 10, 20, 30, 50, 60, 70, 80, 100 nucleotides) and chromosome 7 at one or more of a nucleotide (plus or minus 10, 20, 30, 50, 60, 70, 80, 100 nucleotides), or a fragment thereof. In one embodiment, the CEP89-BRAF fusion comprises a fusion of the nucleotide sequence of: chromosome 19 at one or more of a nucleotide (plus or minus 10, 20, 30, 50, 60, 70, 80, 100 nucleotides) and chromosome 7 at one or more of a nucleotide (plus or minus 10, 20, 30, 50, 60, 70, 80, 100 nucleotides), or a fragment thereof.

[0444] In another embodiment, the CEP89-BRAF fusion comprises a nucleotide sequence (e.g., a fragment of a nucleotide sequence) shown in SEQ ID NO:51 and a nucleotide sequence (e.g., a fragment of a nucleotide sequence) shown in SEQ ID NO:1, or a fragment of the fusion. In one embodiment, the CEP89-BRAF fusion comprises a nucleotide sequence substantially identical to the nucleotide sequence (e.g., a fragment of a nucleotide sequence) shown in SEQ ID NO:51 and the nucleotide sequence (e.g., a fragment of a nucleotide sequence) shown SEQ ID NO: 1, or a fragment of the fusion. In one embodiment, the CEP89-BRAF fusion comprises a nucleotide sequence at least 70%, at least 75%, at least 80%, at least 85%, at least 90%, at least 95%, at least 99%, at least 99.5 or greater, identical to the nucleotide sequence (e.g., a fragment of a nucleotide sequence) shown in SEQ ID NO:51 and to the nucleotide sequence (e.g., a fragment of a nucleotide sequence) shown in SEQ ID NO:1. In one embodiment, the CEP89-BRAF fusion comprises a nucleotide sequence containing at least 25, 50, 100, 150, 200, 500, 1000, 1500, 2000, 2500, 3000, or more nucleotides of the nucleotide sequence shown in SEQ ID NO:51 and a nucleotide sequence containing at least 25, 50, 100, 150, 200, 500, 1000, 1500, 2000, 2500, 3000, or more nucleotides of the nucleotide sequence shown in SEQ ID NO: 1. In one embodiment, the CEP89-BRAF fusion comprises a nucleotide sequence containing at least 25, 50, 100, 150, 200, 500, 1000, 1500, 2000, 2500, 3000, or more contiguous nucleotides of the nucleotide sequence shown in SEQ ID NO:51 and a nucleotide sequence containing at least 25, 50, 100, 150, 200, 500, 1000, 1500, 2000, 2500, 3000, or more nucleotides of the nucleotide sequence shown in SEQ ID NO: 1.

[0445] In another embodiment, the nucleic acid molecule includes a fusion, e.g., an in-frame fusion, of at least 1, 2, 3, 4, 5, 6, 7, 8, 9, 10, 11, 12, 13, 14, 15, 16 or more exons of CEP89 or a fragment thereof (e.g., one or more of exons 1-16 of CEP89 or a fragment thereof), and at least 1, 2, 3, 4, 5, 6, 7, 8, 9, 10 or more exons of BRAF or a fragment thereof (e.g., one or more of exons 9-18 of BRAF or a fragment thereof). In yet other embodiments, the nucleic acid molecule includes a fragment the nucleotide sequence shown in SEQ ID NO:51 and a fragment of the nucleotide sequence shown in SEQ ID NO:1 or a fragment of the fusion, or a sequence substantially identical thereto.

[0446] In one embodiment, the nucleic acid molecule is complementary to at least a portion of a nucleotide sequence disclosed herein, e.g., is capable of hybridizing under a stringency condition described herein to SEQ ID NO:51 and/or SEQ ID NO: 1, or a fragment thereof. In yet another embodiment, the nucleic acid molecule hybridizes to a nucleotide sequence that is complementary to at least a portion of a nucleotide sequence disclosed herein, e.g., is capable of hybridizing under a stringency condition to a nucleotide sequence complementary to SEQ ID NO:51 and/or SEQ ID NO: 1, or a fragment thereof. The nucleotide sequence of a cDNA encoding an exemplary 5′ CEP89-3′ BRAF fusion is shown in at least exon 16 (e.g., exons 1-16) of SEQ ID NO:51 and at least exon 9 (e.g., exons 9-18) of SEQ ID NO: 1, and the predicted amino acid sequence is shown in the corresponding encoded exons of SEQ ID NO:52 and the corresponding encoded exons of SEQ ID NO:2, respectively.

[0447] In an embodiment the CEP89-BRAF nucleic acid molecule comprises sufficient CEP89 and sufficient BRAF sequence such that the encoded 5′ CEP89-3′ BRAF fusion has kinase activity, e.g., has elevated activity. In certain embodiments, the 5′ CEP89-3′ BRAF fusion comprises exons 1-16 from CEP89 and exons 9-18 from BRAF. In certain embodiments, the CEP89-BRAF fusion comprises at least 1, 2, 3, 4, 5, 6, 7, 8, 9, 10, 11, 12, 13, 14, 15, 16 or more exons from CEP89 and at least at least 1, 2, 3, 4, 5, 6, 7, 8, 9, 10 or more exons of BRAF. In certain embodiments, the CEP89-BRAF fusion comprises a fusion of exon 16 from CEP89 and exon 9 from BRAF. In another embodiment, the CEP89-BRAF fusion comprises 1, 2, 3, 4, 5, 6, 7, 8, 9, 10, 11, 12, 13, 14, 15, 16 or more exons of CEP89; and at least 1, 2, 3, 4, 5, 6, 7, 8, 9, 10 or more exons of BRAF.

[0448] In one embodiment, the nucleic acid molecule includes a nucleotide sequence that has an in-frame fusion of intron 16 of CEP89 (e.g., NM 032816) with intron 8 of BRAF (e.g., NM 004333). In another embodiment, the nucleic acid molecule includes a nucleotide sequence that includes a breakpoint. For example, the nucleic acid molecule includes a nucleotide sequence that includes the fusion junction between the CEP89 gene and the BRAF gene, e.g., the breakpoint between intron 16 of CEP89 and intron 8 of BRAF. In other embodiments, the nucleic acid molecules includes a nucleotide sequence of one or more of nucleotide of chromosome 19 coupled to (e.g., directly or indirectly juxtaposed to) one or more of nucleotide of chromosome 7. In one embodiment, the nucleic acid molecule includes the nucleotide sequence of: chromosome 19 at one or more of a nucleotide plus or minus 10, 20, 30, 40 50, 60, 80, 100, 150 nucleotides and chromosome 7 at one or more of a nucleotide plus or minus 10, 20, 30, 40 50, 60, 80, 100, 150 nucleotides (corresponding to the breakpoint of a CEP89-BRAF fusion), or a fragment thereof, or a sequence substantially identical thereto. In one embodiment, the nucleic acid molecule is complementary to at least a portion of a nucleotide sequence disclosed herein, e.g., is capable of hybridizing under a stringency condition described herein to SEQ ID NO:51 and/or SEQ ID NO: 11 or a fragment thereof. In yet other embodiment, the nucleic acid molecule hybridizes to a nucleotide sequence that is complementary to at least a portion of a nucleotide sequence disclosed herein, e.g., is capable of hybridizing under a stringency condition described herein to a nucleotide sequence complementary to SEQ ID NO:51 or SEQ ID NO:1 or a fragment thereof.

[0449] In another embodiment, the CEP89-BRAF fusion nucleic acid comprises at least 6, 12, 15, 20, 25, 50, 75, 100 or more nucleotides from exon 16 of CEP89 (e.g., from the nucleotide sequence of CEP89 preceding the fusion junction with BRAF, e.g., of the CEP89 sequence shown in SEQ ID NO:51), and at least 6, 12, 15, 20, 25, 50, 75, 100 or more nucleotides from exon 9 of BRAF (e.g., from the nucleotide sequence of BRAF following the fusion junction with CEP89, e.g., of the BRAF sequence shown in SEQ ID NO:1).

[0450] In other embodiments, the nucleic acid molecule includes a nucleotide sequence encoding a CEP89-BRAF fusion polypeptide that includes a fragment of a CEP89 gene and a fragment of a BRAF gene. In one embodiment, the nucleotide sequence encodes a CEP89-BRAF fusion polypeptide that includes e.g., a tyrosine kinase domain or a functional fragment thereof. In yet other embodiments, the nucleic acid molecule includes a nucleotide sequence encoding the amino acid sequence (e.g., a fragment of the amino acid sequence) shown in SEQ ID NO:52 and a nucleotide sequence encoding the amino acid sequence (e.g., a fragment of the amino acid sequence) shown in SEQ ID NO:2, or a fragment of the fusion, or a sequence substantially identical thereto. In one embodiment, the encoded CEP89-BRAF fusion polypeptide includes a tyrosine kinase domain or a functional fragment thereof.

[0451] In one embodiment, the CEP89-BRAF fusion includes the full sequence or a fragment of the nucleotide sequence shown in SEQ ID NO:49 and SEQ ID NO:104, or a nucleotide sequence substantially identical thereto. In another embodiment, the CEP89-BRAF fusion polypeptide includes the full sequence or a fragment of the amino acid sequence shown in SEQ ID NO:50 and SEQ ID NO: 105, or an amino acid sequence substantially identical thereto, for example at least 70% or at least 80% or at least 90% identical or even more.

[0452] In a related aspect, the invention features nucleic acid constructs that include the CEP89-BRAF nucleic acid molecules described herein. In certain embodiments, the nucleic acid molecules are operatively linked to a native or a heterologous regulatory sequence. Also included are vectors and host cells that include the CEP89-BRAF nucleic acid molecules described herein, e.g., vectors and host cells suitable for producing the nucleic acid molecules and polypeptides described herein.

[0453] In a related aspect, methods of producing the nucleic acid molecules and polypeptides described herein are also described.

[0454] In another aspect, the invention features nucleic acid molecules that reduce or inhibit the expression of a nucleic acid molecule that encodes a CEP89-BRAF fusion described herein. Examples of such nucleic acid molecules include, for example, antisense molecules, ribozymes, RNAi, triple helix molecules that hybridize to a nucleic acid encoding CEP89-BRAF, or a transcription regulatory region of CEP89-BRAF, and blocks or reduces mRNA expression of CEP89-BRAF.

### Nucleic Acid Detection and Capturing Reagents

[0455] The invention also features a nucleic acid molecule, e.g., nucleic acid fragment, suitable as probe, primer, bait or library member that includes, flanks, hybridizes to, which are useful for identifying, or are otherwise based on, the CEP89-BRAF fusions described herein. In certain embodiments, the probe, primer or bait molecule is an oligonucleotide that allows capture, detection or isolation of a CEP89-BRAF fusion nucleic acid molecule described herein. The oligonucleotide can comprise a nucleotide sequence substantially complementary to a fragment of the CEP89-BRAF fusion nucleic acid molecules described herein. The sequence identity between the nucleic acid fragment, e.g., the oligonucleotide, and the target CEP89-BRAF sequence need not be exact, so long as the sequences are sufficiently complementary to allow the capture, detection or isolation of the target sequence. In one embodiment, the nucleic acid fragment is a probe or primer that includes an oligonucleotide between about 5 and 25, e.g., between 10 and 20, or 10 and 15 nucleotides in length. In other embodiments, the nucleic acid fragment is a bait that includes an oligonucleotide between about 100 to 300 nucleotides, 130 and 230 nucleotides, or 150 and 200 nucleotides, in length.

[0456] In one embodiment, the nucleic acid fragment can be used to identify or capture, e.g., by hybridization, a CEP89-BRAF fusion. For example, the nucleic acid fragment can be a probe, a primer, or a bait, for use in identifying or capturing, e.g., by hybridization, a CEP89-BRAF fusion described herein. In one embodiment, the nucleic acid fragment can be useful for identifying or capturing a CEP89-BRAF breakpoint, e.g., the nucleotide sequence of: chromosome 19 at nucleotide plus or minus 10, 20, 30, 40, 50, 60, 80, 100, 150 nucleotides and chromosome 7 at nucleotide plus or minus 10, 20, 30, 40 50, 60, 80, 100, 150 nucleotides.

[0457] In one embodiment, the nucleic acid fragment hybridizes to a nucleotide sequence within a chromosomal rearrangement that creates an in-frame fusion of intron 16 of CEP89 with intron 8 of BRAF. In one embodiment, the nucleic acid fragment hybridizes to a nucleotide sequence in the region In other embodiments, the nucleic acid molecules includes a nucleotide sequence in the region of a nucleotide sequence of chromosome 19 coupled to (e.g., juxtaposed to) nucleotides in the region of a nucleotide sequence Y of chromosome 17. In one embodiment, the nucleic acid fragment hybridizes to a nucleotide sequence that includes a breakpoint, e.g., the nucleotide sequence of: chromosome 19 at nucleotide plus or minus 10, 20, 30, 40 50, 60, 80, 100, 150 or more nucleotides and chromosome 7 at nucleotide plus or minus 10, 20, 30, 40 50, 60, 80, 100, 150 or more nucleotides. For example, the nucleic acid fragment can hybridize to a nucleotide sequence that includes the fusion junction between the CEP89 gene and the BRAF gene, e.g., a nucleotide sequence that includes a portion of a nucleotide sequence within intron 16 of a CEP89 gene and intron 8 of a BRAF gene.

[0458] In another embodiment, the nucleic acid fragment hybridizes to a nucleotide sequence that comprises at least 6, 12, 15, 20, 25, 50, 75, 100, 150 or more nucleotides from exon 16 of CEP89 (e.g., from the nucleotide sequence of CEP89 preceding the fusion junction with BRAF, e.g., of the CEP89 sequence shown in SEQ ID NO:51), and at least 6, 12, 15, 20, 25, 50, 75, 100, 150 or more nucleotides from exon 9 of BRAF (e.g., from the nucleotide sequence of BRAF following the fusion junction with CEP89, e.g., of the BRAF sequence shown in SEQ ID NO: 1).

[0459] The probes or primers described herein can be used, for example, for FISH detection or PCR amplification. In one exemplary embodiment where detection is based on PCR, amplification of the CEP89-BRAF fusion junction fusion junction can be performed using a primer or a primer pair, e.g., for amplifying a sequence flanking the fusion junctions described herein, e.g., the mutations or the junction of a chromosomal rearrangement described herein, e.g., CEP89-BRAF.

[0460] In one embodiment, a pair of isolated oligonucleotide primers can amplify a region containing or adjacent to a position in the CEP89-BRAF fusion. For example, forward primers can be designed to hybridize to a nucleotide sequence within CEP89 genomic or mRNA sequence (e.g., a nucleotide sequence within exon 16 of CEP89 of SEQ ID NO:51, and the reverse primers can be designed to hybridize to a nucleotide sequence of BRAF (e.g., a nucleotide sequence within exon 9 of BRAF, of SEQ ID NO:1.

[0461] In another embodiment, the nucleic acid fragments can be used to identify, e.g., by hybridization, a CEP89-BRAF fusion. In one embodiment, the nucleic acid fragment hybridizes to a nucleotide sequence that includes a fusion junction between the CEP89 transcript and the BRAF transcript.

[0462] In other embodiments, the nucleic acid fragment includes a bait that comprises a nucleotide sequence that hybridizes to a CEP89-BRAF fusion nucleic acid molecule described herein, and thereby allows the capture or isolation said nucleic acid molecule. In one embodiment, a bait is suitable for solution phase hybridization. In other embodiments, a bait includes a binding entity, e.g., an affinity tag, that allows capture and separation, e.g., by binding to a binding entity, of a hybrid formed by a bait and a nucleic acid hybridized to the bait.

[0463] In other embodiments, the nucleic acid fragment includes a library member comprising a CEP89-BRAF nucleic acid molecule described herein. In one embodiment, the library member includes a rearrangement that results in a CEP89-BRAF fusion described herein.

[0464] The nucleic acid fragment can be detectably labeled with, e.g., a radiolabel, a fluorescent label, a bioluminescent label, a chemiluminescent label, an enzyme label, a binding pair label, or can include an affinity tag; a tag, or identifier (e.g., an adaptor, barcode or other sequence identifier).

### CEP89-BRAF Fusion Polypeptides

[0465] In another embodiment, the CEP89-BRAF fusion comprises an amino acid sequence (e.g., a fragment of the amino acid sequence) shown in SEQ ID NO:52 and an amino acid sequence (e.g., a fragment of the amino acid sequence) shown in SEQ ID NO:2, or a fragment of the fusion. In one embodiment, the CEP89-BRAF fusion comprises an amino acid sequence substantially identical to the amino acid sequence (e.g., a fragment of the amino acid sequence) shown in SEQ ID NO:52 and the amino acid sequence (e.g., a fragment of the amino acid sequence) shown in SEQ ID NO:2, or a fragment thereof. In one embodiment, the CEP89-BRAF fusion comprises an amino acid sequence at least 70%, at least 75%, at least 80%, at least 85%, at least 90%, at least 95%, at least 99%, at least 99.5 or greater, identical to the amino acid sequence (e.g., a fragment of the amino acid sequence) shown in 142 SEQ ID NO:52 and the amino acid sequence (e.g., a fragment of the amino acid sequence) shown in SEQ ID NO:2. In one embodiment, the CEP89-BRAF fusion comprises a sequence containing at least 10, 20, 50, 100, 500, 600, 700, 800, 900, 1000, or more amino acids of the amino acid sequence shown in SEQ ID NO:52 and SEQ ID NO:2. In one embodiment, the CEP89-BRAF fusion comprises an amino acid sequence containing at least 5, 10, 20, 50, 100, 500, 600, 700, 800, 900, 1000, or more contiguous amino acids of the amino acid sequence shown in SEQ ID NO:52 and at least 5, 10, 20, 50, 100, 500, 600, 700, 800, 900, 1000, or more contiguous amino acids of the amino acid sequence shown in SEQ ID NO:2. In one embodiment, the 5′ CEP89-3′ BRAF fusion polypeptide includes a receptor tyrosine kinase domain or a functional fragment thereof. In an embodiment, the 5′CEP89-3′BRAF fusion polypeptide comprises sufficient BRAF and sufficient CEP89 sequence such that it has kinase activity, e.g., has elevated activity.

[0466] In another aspect, the invention features a CEP89-BRAF fusion polypeptide (e.g., a purified CEP89-BRAF fusion polypeptide), a biologically active or antigenic fragment thereof, as well as reagents (e.g., antibody molecules that bind to a CEP89-BRAF fusion polypeptide), methods for modulating a CEP89-BRAF polypeptide activity and detection of a CEP89-BRAF polypeptide.

[0467] In one embodiment, the CEP89-BRAF fusion polypeptide has at least one biological activity. In one embodiment, at least one biological activity of the CEP89-BRAF fusion polypeptide is reduced or inhibited by an anti-cancer drug, e.g., a CEP89 inhibitor, a BRAF inhibitor. In one embodiment, at least one biological activity of the CEP89-BRAF fusion polypeptide is reduced or inhibited by a BRAF inhibitor. In one embodiment, at least one biological activity of the CEP89-BRAF fusion polypeptide is reduced or inhibited by a CEP89 inhibitor. In one embodiment, at least one biological activity of the CEP89-BRAF fusion polypeptide is reduced or inhibited by a BRAF inhibitor, e.g., vemurafenib (also known as RG7204; or PLX4032; or Zelboraf); GDC-0879; PLX-4702; AZ628; dabrafenib (GSK2118346A); or Sorafenib Tosylate.

[0468] In yet other embodiments, the CEP89-BRAF fusion polypeptide is encoded by a nucleic acid molecule described herein. In one embodiment, the CEP89-BRAF fusion polypeptide is encoded by an in-frame fusion of intron 16 of CEP89 with intron 8 of BRAF (e.g., a sequence on chromosome 19 and a sequence on chromosome 7). In another embodiment, the CEP89-BRAF fusion polypeptide includes an amino acid sequence encoded by a nucleotide sequence comprising a fusion junction between the CEP89 transcript and the BRAF transcript.

[0469] In certain embodiments, the CEP89-BRAF fusion polypeptide comprises one or more of encoded exons 1-16 from CEP89 and one or more of encoded exons 9-18 of BRAF. In certain embodiments, the CEP89-BRAF fusion polypeptide comprises at least 1, 2, 3, 4, 5, 6, 7, 8, 9, 10, 11, 12, 13, 14, 15, 16 or more encoded exons of CEP89 and at least at least 1, 2, 3, 4, 5, 6, 7, 8, 9, 10 or more encoded exons of BRAF. In certain embodiments, the CEP89-BRAF fusion polypeptide comprises a fusion of encoded exon 16 from CEP89 and encoded exon 9 from BRAF (or a fragment thereof). In other embodiments, the fusion comprises at least 1, 2, 3, 4, 5, 6, 7, 8, 9, 10, 11, 12, 13, 14, 15, 16 or more encoded exons of CEP89; and at least 1, 2, 3, 4, 5, 6, 7, 8, 9, 10 or more encoded exons of BRAF. In certain embodiments, the CEP89-BRAF fusion polypeptide comprises encoded exons 1-16 from CEP89 and exons 9-18 of BRAF. In certain embodiments, the 5′ CEP89-3′ BRAF fusion polypeptide comprises a fusion junction of the sequence of exon 16 from CEP89 and the sequence of exon 9 from BRAF.

[0470] In certain embodiments, the CEP89-BRAF fusion comprises the amino acid sequence corresponding to exon 16 or a fragment thereof from CEP89, and the amino acid sequence corresponding to exon 9 or a fragment thereof from BRAF (e.g., as shown in SEQ ID NO:52 and SEQ ID NO:2). In one embodiment, the CEP89-BRAF fusion comprises at least 5, 10, 15, 20 or more amino acids from exon 16 of CEP89 (e.g., from the amino acid sequence of CEP89 preceding the fusion junction with BRAF, e.g., of the CEP89 sequence shown in SEQ ID NO:52), and at least 5, 10, 15, 20 or more amino acids from exon 9 of BRAF (e.g., from the amino acid sequence of BRAF following the fusion junction with CEP89, e.g., of the BRAF sequence shown in SEQ ID NO:2).

[0471] In one embodiment, the CEP89-BRAF fusion polypeptide includes a tyrosine kinase domain or a functional fragment thereof. In a related aspect, the invention features CEP89-BRAF fusion polypeptide or fragments operatively linked to heterologous polypeptides to form fusion proteins.

[0472] In another embodiment, the CEP89-BRAF fusion polypeptide or fragment is a peptide, e.g., an immunogenic peptide or protein containing a fusion junction described herein. Such immunogenic peptides or proteins can be used to raise antibodies specific to the fusion protein. In other embodiments, such immunogenic peptides or proteins can be used for vaccine preparation. The vaccine preparation can include other components, e.g., an adjuvant.

[0473] In another aspect, the invention features antibody molecules that bind to a CEP89-BRAF fusion polypeptide or fragment described herein. In embodiments, the antibody can distinguish wild type BRAF (or CEP89) from CEP89-BRAF.

### Detection Reagents and Detection of Mutations

[0474] In another aspect, the invention features a detection reagent, e.g., a purified or an isolated preparation thereof. Detection reagents can distinguish a nucleic acid, or protein sequence, having a breakpoint, e.g., a CEP89-BRAF breakpoint; from a reference sequence. In one embodiment, the detection reagent detects (e.g., specifically detects) a CEP89-BRAF fusion nucleic acid or a polypeptide, e.g., distinguishes a wild type BRAF or another BRAF fusion (or CEP89) from a CEP89-BRAF nucleic acid (e.g., as described herein in SEQ ID NO:51 and SEQ ID NO: 1); or a CEP89-BRAF polypeptide (e.g., as described herein in SEQ ID NO:52 and SEQ ID NO:2).

[0475] Detection reagents, e.g., nucleic acid-based detection reagents, can be used to identify mutations in a target nucleic acid, e.g., DNA, e.g., genomic DNA or cDNA, or RNA. e.g., in a sample, e.g., a sample of nucleic acid derived from a neoplastic or tumor cell, e.g., a melanocytic neoplasm, melanoma or metastatic cell. Detection reagents, e.g., antibody-based detection reagents, can be used to identify mutations in a target protein, e.g., in a sample, e.g., a sample of protein derived from, or produced by, a neoplastic or tumor cell, e.g., a melanocytic neoplasm, melanoma or metastatic cell.

### Method of Treatment

[0476] In a related aspect, a method of inhibiting, reducing, or treating a hyperproliferative disorder, e.g., a neoplasm (including benign, pre-malignant or malignant (e.g., a cancer), in a subject is provided. The method includes administering to the subject a preselected therapeutic agent, e.g., an anti-cancer agent (e.g., a kinase inhibitor), as a single agent, or in combination, in an amount sufficient to reduce, inhibit or treat the activity or expression of CEP89-BRAF (e.g., a CEP89-BRAF fusion described herein), thereby inhibiting, reducing, or treating the hyperproliferative disorder in the subject.

[0477] In one embodiment, the subject treated has a CEP89-BRAF fusion; e.g., the subject has a tumor or cancer harboring a CEP89-BRAF fusion. In other embodiments, the subject has been previously identified as having a CEP89-BRAF fusion. In yet other embodiments, the subject has been previously identified as being likely or unlikely to respond to treatment with a protein kinase inhibitor, e.g., a subject that has previously participated in a clinical trial. In other embodiments, the subject has been previously identified as being likely or unlikely to respond to treatment with a protein kinase inhibitor, based on the presence of the CEP89-BRAF fusion. In one embodiment, the subject is a mammal, e.g., a human. In one embodiment, the subject has, or at risk of having a cancer at any stage of disease. In other embodiments, the subject is a patient, e.g., a cancer patient.

[0478] In certain embodiments, the neoplasm or neoplastic cell is a benign, pre-malignant, malignant (cancer) or metastasis. In certain embodiments, the cancer is a solid tumor, a soft tissue tumor, or a metastatic lesion.

[0479] In one embodiment, the neoplasm or neoplastic cell is a benign, pre-malignant, malignant (cancer) or metastasis. In certain embodiments, the cancer is a solid tumor, a soft tissue tumor, or a metastatic lesion. In one embodiment, the cancer is a carcinoma. In one embodiment the cancer is a papillary thyroid carcinoma. In one embodiment the cancer is a pilocytic astrocytomas. In one embodiment, the cancer is a melanocytic tumor. In one embodiment, the cancer is an adenocarcinoma. In an embodiment, the cancer is a lung adenocarcinoma. In one embodiment, the cancer is chosen from a lung cancer, a pancreatic cancer, melanoma, a colorectal cancer, an esophageal-gastric cancer, a thyroid cancer, or an adenocarcinoma. In one embodiment, the cancer is a lung adenocarcinoma. In other embodiment, the lung cancer is chosen from one or more of the following: non-small cell lung cancer (NSCLC), small cell lung cancer (SCLC), squamous cell carcinoma (SCC), adenocarcinoma of the lung, bronchogenic carcinoma, or a combination thereof. In one embodiment, the lung cancer is NSCLC or SCC.

[0480] In one embodiment, the anti-cancer agent is a BRAF inhibitor. In one embodiment, the anti-cancer agent is a CEP89 inhibitor. In one embodiment, the anti-cancer agent is a kinase inhibitor. In one embodiment, the anti-cancer agent is a BRAF inhibitor, e.g., vemurafenib (also known as RG7204; or PLX4032; or Zelboraf); GDC-0879; PLX-4702; AZ628; dabrafenib (GSK2118346A); or Sorafenib Tosylate.

### HLA-A-ROS1 Fusions

[0481] In one embodiment, a fusion includes an in-frame fusion of an exon of human leukocyte antigens A (HLA-A), e.g., one more exons of HLA-A (e.g., one or more of exons 1-7 of HLA-A) or a fragment thereof, and an exon of C-Ros oncogene 1 (ROS1. e.g., one or more exons of a ROS1 (such as, one or more of exons 34-43 of ROS1) or a fragment thereof. For example, the HLA-A-ROS1 fusion can include an in-frame fusion within an intron of HLA-A (e.g., intron 7 or a fragment thereof, with an intron of ROS1 (for example, intron 33) or a fragment thereof. In one embodiment, the fusion of the HLA-A-ROS1 fusion comprises the nucleotide sequence of: chromosome 6 at one or more of a nucleotide (plus or minus 10, 20, 30, 50, 60, 70, 80, 100 or more nucleotides) and chromosome 6 at one or more of a nucleotide (plus or minus 10, 20, 30, 50, 60, 70, 80, 100 or more nucleotides). In one embodiment, the HLA-A-ROS1 fusion is a translocation. e.g., a translocation of a portion of chromosome 6 and a portion of chromosome 6.

[0482] In certain embodiments, the HLA-A-ROS1 fusion is in a 5′-HLA-A to 3′-ROS1 configuration (also referred to herein as “5′-HLA-A-ROS1-3′).” The term “fusion” or “fusion molecule” can refer to a polypeptide or a nucleic acid fusion, depending on the context. It may include a full-length sequence of a fusion or a fragment thereof, e.g., a fusion junction (e.g., a fragment including a portion of HLA-A and a portion of ROS1, e.g., a portion of the HLA-A-ROS fusion described herein). In one embodiment, the HLA-A-ROS1 fusion polypeptide includes a fragment of the amino acid sequence shown in SEQ ID NO:38 and a fragment of the amino acid sequence shown in SEQ ID NO:12, or an amino acid sequence substantially identical thereto. In another embodiment, the HLA-A-ROS1 fusion nucleic acid includes a fragment of the nucleotide sequence shown in SEQ ID NO:37 and a fragment of the nucleotide sequence shown in SEQ ID NO: 1, or a nucleotide sequence substantially identical thereto. In one embodiment, the HLA-A-ROS1 fusion polypeptide comprises sufficient HLA-A and sufficient ROS1 sequence such that the 5′ HLA-A-3′ ROS1 fusion has kinase activity, e.g., has elevated activity, e.g., tyrosine kinase activity. In any event, the fusion causes activation in the cells harboring it of oncogenic signaling pathways.

[0483] In certain embodiments, the HLA-A-ROS1 fusion comprises one or more (or all of) exons 1-7 from HLA-A and one or more (or all of) exons 34-43 of ROS1 (e.g., one or more of the exons shown in SEQ ID NO:37 and SEQ ID NO: 11. In another embodiment, the HLA-A-ROS1 fusion comprises one or more (or all of) exons 1-7 of HLA-A and one or more (or all of) exons 34-43 of ROS1. In certain embodiments, the HLA-A-ROS1 fusion comprises at least 1, 2, 3, 4, 5, 6, 7 or more exons (or encoded exons) from HLA-A and at least 1, 2, 3, 4, 5, 6, 7, 8, 9, 10 or more exons (or encoded exons) from ROS1 (e.g., from the HLA-A and ROS1 sequences shown in SEQ ID NO:37 and SEQ ID NO:38 and SEQ ID NO: 11 and SEQ ID NO:12.

[0484] In certain embodiments, the HLA-A-ROS1 fusion comprises exons 1-7 or a fragment thereof from HLA-A, and exons 34-43 or a fragment thereof from ROS1 (e.g., as shown in SEQ ID NO:37 and SEQ ID NO:11. In one embodiment, the HLA-A-ROS1 fusion comprises at least 5, 10, 15, 20, 30, 40, 50 or more amino acids from exons 1-7 of HLA-A (e.g., from the amino acid sequence of HLA-A as shown in SEQ ID NO:38 (e.g., from the amino acid sequence of HLA-A preceding the fusion junction with ROS1, and at least 5, 10, 15, 20, 30, 40, 50 or more amino acids from exons 34-43 of ROS1 (e.g., from the amino acid sequence of ROS1 as shown in SEQ ID NO:12. In another embodiment, the HLA-A-ROS1 fusion comprises at least 6, 12, 15, 20, 25, 50, 75, 100 or more nucleotides from exons 1-7 of HLA-A (e.g., from the nucleotide sequence of HLA-A as shown in SEQ ID NO:37 (e.g., from the nucleotide sequence of HLA-A preceding the fusion junction with ROS1; and at least 6, 12, 15, 20, 25, 50, 75, 100 or more nucleotides from exons 34-43 of ROS1 (e.g., from the nucleotide sequence of ROS1 as shown in SEQ ID NO: 11.

### HLA-A-ROS1 Nucleic Acid Molecules

[0485] In one aspect, the invention features a nucleic acid molecule (e.g., an isolated or purified) nucleic acid molecule that includes a fragment of a HLA-A gene and a fragment of a ROS1 gene. In one embodiment, the nucleotide sequence encodes a HLA-A-ROS1 fusion polypeptide that includes a tyrosine kinase domain or a functional fragment thereof. In another embodiment, the nucleotide sequence encodes a fragment of the ROS1 polypeptide including the amino acid sequence of SEQ ID NO: 12 or a fragment thereof, or a sequence substantially identical thereto. In other embodiments, the nucleic acid molecule includes a fragment of the HLA-A gene encoding the amino acid sequence of SEQ ID NO:38 or a fragment thereof, or a sequence substantially identical thereto. In yet other embodiments, the nucleic acid molecule includes a nucleotide sequence encoding the amino acid sequence shown in SEQ ID NO:38, or a fragment thereof, and the amino acid sequence shown in SEQ ID NO: 12 or a fragment thereof, or a sequence substantially identical thereto.

[0486] In one embodiment, the nucleic acid molecule includes a fusion, e.g., an in-frame fusion, between an intron of HLA-A (e.g., intron 7, or a fragment thereof), and an intron of ROS1 (e.g., intron 33, or a fragment thereof). The HLA-A-ROS1 fusion can comprise a fusion of the nucleotide sequence of: chromosome 6 at one or more of a nucleotide (plus or minus 10, 20, 30, 50, 60, 70, 80, 100 nucleotides) and chromosome 6 at one or more of a nucleotide (plus or minus 10, 20, 30, 50, 60, 70, 80, 100 nucleotides), or a fragment thereof. In one embodiment, the HLA-A-ROS1 fusion comprises a fusion of the nucleotide sequence of: chromosome 6 at one or more of a nucleotide (plus or minus 10, 20, 30, 50, 60, 70, 80, 100 nucleotides) and chromosome 6 at one or more of a nucleotide (plus or minus 10, 20, 30, 50, 60, 70, 80, 100 nucleotides), or a fragment thereof.

[0487] In another embodiment, the HLA-A-ROS1 fusion comprises a nucleotide sequence (e.g., a fragment of a nucleotide sequence) shown in SEQ ID NO:37 and a nucleotide sequence (e.g., a fragment of a nucleotide sequence) shown in SEQ ID NO: 11, or a fragment of the fusion. In one embodiment, the HLA-A-ROS1 fusion comprises a nucleotide sequence substantially identical to the nucleotide sequence (e.g., a fragment of a nucleotide sequence) shown in SEQ ID NO:37 and the nucleotide sequence (e.g., a fragment of a nucleotide sequence) shown SEQ ID NO: 11, or a fragment of the fusion. In one embodiment, the HLA-A-ROS1 fusion comprises a nucleotide sequence at least 70%, at least 75%, at least 80%, at least 85%, at least 90%, at least 95%, at least 99%, at least 99.5 or greater, identical to the nucleotide sequence (e.g., a fragment of a nucleotide sequence) shown in SEQ ID NO:37 and to the nucleotide sequence (e.g., a fragment of a nucleotide sequence) shown in SEQ ID NO: 11. In one embodiment, the HLA-A-ROS1 fusion comprises a nucleotide sequence containing at least 25, 50, 100, 150, 200, 500, 1000, 1500, 2000, 2500, 3000, or more nucleotides of the nucleotide sequence shown in SEQ ID NO:37 and a nucleotide sequence containing at least 25, 50, 100, 150, 200, 500, 1000, 1500, 2000, 2500, 3000, or more nucleotides of the nucleotide sequence shown in SEQ ID NO:11. In one embodiment, the HLA-A-ROS1 fusion comprises a nucleotide sequence containing at least 25, 50, 100, 150, 200, 500, 1000, 1500, 2000, 2500, 3000, or more contiguous nucleotides of the nucleotide sequence shown in SEQ ID NO:37 and a nucleotide sequence containing at least 25, 50, 100, 150, 200, 500, 1000, 1500, 2000, 2500, 3000, or more nucleotides of the nucleotide sequence shown in SEQ ID NO:11.

[0488] In another embodiment, the nucleic acid molecule includes a fusion, e.g., an in-frame fusion, of at least 1, 2, 3, 4, 5, 6, 7 or more exons of HLA-A or a fragment thereof (e.g., one or more of exons 1-7 of HLA-A or a fragment thereof), and at least 1, 2, 3, 4, 5, 6, 7, 8, 9, 10 or more exons of ROS1 or a fragment thereof (e.g., one or more of exons 34-43 of ROS1 or a fragment thereof). In yet other embodiments, the nucleic acid molecule includes a fragment the nucleotide sequence shown in SEQ ID NO:37 and a fragment of the nucleotide sequence shown in SEQ ID NO: 11 or a fragment of the fusion, or a sequence substantially identical thereto.

[0489] In one embodiment, the nucleic acid molecule is complementary to at least a portion of a nucleotide sequence disclosed herein, e.g., is capable of hybridizing under a stringency condition described herein to SEQ ID NO:37 and/or SEQ ID NO: 11, or a fragment thereof. In yet another embodiment, the nucleic acid molecule hybridizes to a nucleotide sequence that is complementary to at least a portion of a nucleotide sequence disclosed herein, e.g., is capable of hybridizing under a stringency condition to a nucleotide sequence complementary to SEQ ID NO:37 and/or SEQ ID NO: 11, or a fragment thereof. The nucleotide sequence of a cDNA encoding an exemplary 5′ HLA-A-3′ ROS1 fusion is shown in at least exon 7 (e.g., exons 1-7 of SEQ ID NO:37 and at least exon 34 (e.g., exons 34-43 of SEQ ID NO: 11, and the predicted amino acid sequence is shown in the corresponding encoded exons of SEQ ID NO: 38 and the corresponding encoded exons of SEQ ID NO: 12, respectively.

[0490] In an embodiment the HLA-A-ROS1 nucleic acid molecule comprises sufficient HLA-A and sufficient ROS1 sequence such that the encoded 5′ HLA-A-3′ ROS1 fusion has kinase activity, e.g., has elevated activity. In certain embodiments, the 5′ HLA-A-3′ ROS1 fusion comprises exons 1-7 from HLA-A and exons 36-43 from ROS1. In certain embodiments, the HLA-A-ROS1 fusion comprises at least 1, 2, 3, 4, 5, 6, 7 or more exons from HLA-A and at least at least 1, 2, 3, 4, 5, 6, 7, 8, 9, 10 or more exons of ROS1. In certain embodiments, the HLA-A-ROS1 fusion comprises a fusion of exon 7 from HLA-A and exon 34 from ROS1. In another embodiment, the HLA-A-ROS1 fusion comprises 1, 2, 3, 4, 5, 6, 7 or more exons of HLA-A; and at least 1, 2, 3, 4, 5, 6, 7, 8, 9, 10 or more exons of ROS1.

[0491] In one embodiment, the nucleic acid molecule includes a nucleotide sequence that has an in-frame fusion of intron 7 of HLA-A (e.g., NM_{—}002116 with intron 34 of ROS1 (e.g., NM_{—}002944. In another embodiment, the nucleic acid molecule includes a nucleotide sequence that includes a breakpoint. For example, the nucleic acid molecule includes a nucleotide sequence that includes the fusion junction between the HLA-A gene and the ROS1 gene. e.g., the breakpoint between intron 7 of HLA-A and intron 33 of ROS1. In other embodiments, the nucleic acid molecules includes a nucleotide sequence of one or more of nucleotide of chromosome 6 coupled to (e.g., directly or indirectly juxtaposed to) one or more of nucleotide of chromosome 6. In one embodiment, the nucleic acid molecule includes the nucleotide sequence of: chromosome 6 at one or more of a nucleotide plus or minus 10, 20, 30, 40 50, 60, 80, 100, 150 nucleotides and chromosome 6 at one or more of a nucleotide plus or minus 10, 20, 30, 40 50, 60, 80, 100, 150 nucleotides (corresponding to the breakpoint of a HLA-A-ROS1 fusion), or a fragment thereof, or a sequence substantially identical thereto. In one embodiment, the nucleic acid molecule is complementary to at least a portion of a nucleotide sequence disclosed herein, e.g., is capable of hybridizing under a stringency condition described herein to SEQ ID NO:37 and/or SEQ ID NO: 11 or a fragment thereof. In yet other embodiment, the nucleic acid molecule hybridizes to a nucleotide sequence that is complementary to at least a portion of a nucleotide sequence disclosed herein, e.g., is capable of hybridizing under a stringency condition described herein to a nucleotide sequence complementary to SEQ ID NO:37 or SEQ ID NO:11 or a fragment thereof.

[0492] In another embodiment, the HLA-A-ROS1 fusion nucleic acid comprises at least 6, 12, 15, 20, 25, 50, 75, 100 or more nucleotides from exon 7 of HLA-A (e.g., from the nucleotide sequence of HLA-A preceding the fusion junction with ROS1, e.g., of the HLA-A sequence shown in SEQ ID NO:37, and at least 6, 12, 15, 20, 25, 50, 75, 100 or more nucleotides from exon 34 of ROS1 (e.g., from the nucleotide sequence of ROS1 following the fusion junction with HLA-A, e.g., of the ROS1 sequence shown in SEQ ID NO:11.

[0493] In other embodiments, the nucleic acid molecule includes a nucleotide sequence encoding a HLA-A-ROS1 fusion polypeptide that includes a fragment of a HLA-A gene and a fragment of a ROS1 gene. In one embodiment, the nucleotide sequence encodes a HLA-A-ROS1 fusion polypeptide that includes e.g., a tyrosine kinase domain or a functional fragment thereof. In yet other embodiments, the nucleic acid molecule includes a nucleotide sequence encoding the amino acid sequence (e.g., a fragment of the amino acid sequence) shown in SEQ ID NO:38 and a nucleotide sequence encoding the amino acid sequence (e.g., a fragment of the amino acid sequence) shown in SEQ ID NO:12, or a fragment of the fusion, or a sequence substantially identical thereto. In one embodiment, the encoded HLA-A-ROS1 fusion polypeptide includes a tyrosine kinase domain or a functional fragment thereof.

[0494] In one embodiment, the HLA-A-ROS1 fusion includes the full sequence or a fragment of the nucleotide sequence shown in SEQ ID NO:35 and SEQ ID NO:82, or a nucleotide sequence substantially identical thereto. In another embodiment, the HLA-A-ROS1 fusion polypeptide includes the full sequence or a fragment of the amino acid sequence shown in SEQ ID NO:36 and SEQ ID NO:83, or an amino acid sequence substantially identical thereto.

[0495] In a related aspect, the invention features nucleic acid constructs that include the HLA-A-ROS1 nucleic acid molecules described herein. In certain embodiments, the nucleic acid molecules are operatively linked to a native or a heterologous regulatory sequence. Also included are vectors and host cells that include the HLA-A-ROS1 nucleic acid molecules described herein, e.g., vectors and host cells suitable for producing the nucleic acid molecules and polypeptides described herein.

[0496] In a related aspect, methods of producing the nucleic acid molecules and polypeptides described herein are also described.

[0497] In another aspect, the invention features nucleic acid molecules that reduce or inhibit the expression of a nucleic acid molecule that encodes a HLA-A-ROS1 fusion described herein. Examples of such nucleic acid molecules include, for example, antisense molecules, ribozymes, RNAi, triple helix molecules that hybridize to a nucleic acid encoding HLA-A-ROS1, or a transcription regulatory region of HLA-A-ROS1, and blocks or reduces mRNA expression of HLA-A-ROS1.

### Nucleic Acid Detection and Capturing Reagents

[0498] The invention also features a nucleic acid molecule, e.g., nucleic acid fragment, suitable as probe, primer, bait or library member that includes, flanks, hybridizes to, which are useful for identifying, or are otherwise based on, the HLA-A-ROS1 fusions described herein. In certain embodiments, the probe, primer or bait molecule is an oligonucleotide that allows capture, detection or isolation of a HLA-A-ROS1 fusion nucleic acid molecule described herein. The oligonucleotide can comprise a nucleotide sequence substantially complementary to a fragment of the HLA-A-ROS1 fusion nucleic acid molecules described herein. The sequence identity between the nucleic acid fragment, e.g., the oligonucleotide, and the target HLA-A-ROS1 sequence need not be exact, so long as the sequences are sufficiently complementary to allow the capture, detection or isolation of the target sequence. In one embodiment, the nucleic acid fragment is a probe or primer that includes an oligonucleotide between about 5 and 25, e.g., between 10 and 20, or 10 and 15 nucleotides in length. In other embodiments, the nucleic acid fragment is a bait that includes an oligonucleotide between about 100 to 300 nucleotides, 152 and 230 nucleotides, or 150 and 200 nucleotides, in length.

[0499] In one embodiment, the nucleic acid fragment can be used to identify or capture, e.g., by hybridization, a HLA-A-ROS1 fusion. For example, the nucleic acid fragment can be a probe, a primer, or a bait, for use in identifying or capturing, e.g., by hybridization, a HLA-A-ROS1 fusion described herein. In one embodiment, the nucleic acid fragment can be useful for identifying or capturing a HLA-A-ROS1 breakpoint, e.g., the nucleotide sequence of: chromosome 6 at nucleotide plus or minus 10, 20, 30, 40, 50, 60, 80, 100, 150 nucleotides and chromosome 6 at nucleotide plus or minus 10, 20, 30, 40 50, 60, 80, 100, 150 nucleotides.

[0500] In one embodiment, the nucleic acid fragment hybridizes to a nucleotide sequence within a chromosomal rearrangement that creates an in-frame fusion of intron 7 of HLA-A with intron 33 of ROS1. In one embodiment, the nucleic acid fragment hybridizes to a nucleotide sequence in the region In other embodiments, the nucleic acid molecules includes a nucleotide sequence in the region of a nucleotide sequence of chromosome 6 coupled to (e.g., juxtaposed to) nucleotides in the region of a nucleotide sequence of chromosome 6. In one embodiment, the nucleic acid fragment hybridizes to a nucleotide sequence that includes a breakpoint, e.g., the nucleotide sequence of: chromosome 6 at nucleotide plus or minus 10, 20, 30, 40 50, 60, 80, 100, 150 or more nucleotides and chromosome 6 at nucleotide plus or minus 10, 20, 30, 40 50, 60, 80, 100, 150 or more nucleotides. For example, the nucleic acid fragment can hybridize to a nucleotide sequence that includes the fusion junction between the HLA-A gene and the ROS1 gene, e.g., a nucleotide sequence that includes a portion of a nucleotide sequence within intron 7 of a HLA-A gene and intron 33 of a ROS1 gene.

[0501] In another embodiment, the nucleic acid fragment hybridizes to a nucleotide sequence that comprises at least 6, 12, 15, 20, 25, 50, 75, 100, 150 or more nucleotides from exon 7 of HLA-A (e.g., from the nucleotide sequence of HLA-A preceding the fusion junction with ROS1, e.g., of the HLA-A sequence shown in SEQ ID NO:37, and at least 6, 12, 15, 20, 25, 50, 75, 100, 150 or more nucleotides from exon 34 of ROS1 (e.g., from the nucleotide sequence of ROS1 following the fusion junction with HLA-A, e.g., of the ROS1 sequence shown in SEQ ID NO:11.

[0502] The probes or primers described herein can be used, for example, for FISH detection or PCR amplification. In one exemplary embodiment where detection is based on PCR, amplification of the HLA-A-ROS1 fusion junction fusion junction can be performed using a primer or a primer pair, e.g., for amplifying a sequence flanking the fusion junctions described herein, e.g., the mutations or the junction of a chromosomal rearrangement described herein, e.g., HLA-A-ROS1.

[0503] In one embodiment, a pair of isolated oligonucleotide primers can amplify a region containing or adjacent to a position in the HLA-A-ROS1 fusion. For example, forward primers can be designed to hybridize to a nucleotide sequence within HLA-A genomic or mRNA sequence (e.g., a nucleotide sequence within exon 7 of HLA-A of SEQ ID NO:37, and the reverse primers can be designed to hybridize to a nucleotide sequence of ROS1 (e.g., a nucleotide sequence within exon 34 of ROS1, of SEQ ID NO:11.

[0504] In another embodiment, the nucleic acid fragments can be used to identify, e.g., by hybridization, a HLA-A-ROS1 fusion. In one embodiment, the nucleic acid fragment hybridizes to a nucleotide sequence that includes a fusion junction between the HLA-A transcript and the ROS1 transcript.

[0505] In other embodiments, the nucleic acid fragment includes a bait that comprises a nucleotide sequence that hybridizes to a HLA-A-ROS1 fusion nucleic acid molecule described herein, and thereby allows the capture or isolation said nucleic acid molecule. In one embodiment, a bait is suitable for solution phase hybridization. In other embodiments, a bait includes a binding entity, e.g., an affinity tag, that allows capture and separation, e.g., by binding to a binding entity, of a hybrid formed by a bait and a nucleic acid hybridized to the bait.

[0506] In other embodiments, the nucleic acid fragment includes a library member comprising a HLA-A-ROS1 nucleic acid molecule described herein. In one embodiment, the library member includes a rearrangement that results in a HLA-A-ROS1 fusion described herein.

[0507] The nucleic acid fragment can be detectably labeled with, e.g., a radiolabel, a fluorescent label, a bioluminescent label, a chemiluminescent label, an enzyme label, a binding pair label, or can include an affinity tag; a tag, or identifier (e.g., an adaptor, barcode or other sequence identifier).

### HLA-A-ROS1 Fusion Polypeptides

[0508] In another embodiment, the HLA-A-ROS1 fusion comprises an amino acid sequence (e.g., a fragment of the amino acid sequence) shown in SEQ ID NO:38 and an amino acid sequence (e.g., a fragment of the amino acid sequence) shown in SEQ ID NO:12, or a fragment of the fusion. In one embodiment, the HLA-A-ROS1 fusion comprises an amino acid sequence substantially identical to the amino acid sequence (e.g., a fragment of the amino acid sequence) shown in SEQ ID NO:38 and the amino acid sequence (e.g., a fragment of the amino acid sequence) shown in SEQ ID NO:12, or a fragment thereof. In one embodiment, the HLA-A-ROS1 fusion comprises an amino acid sequence at least 70%, at least 75%, at least 80%, at least 85%, at least 90%, at least 95%, at least 99%, at least 99.5 or greater, identical to the amino acid sequence (e.g., a fragment of the amino acid sequence) shown in SEQ ID NO:38 and the amino acid sequence (e.g., a fragment of the amino acid sequence) shown in SEQ ID NO:12. In one embodiment, the HLA-A-ROS1 fusion comprises a sequence containing at least 10, 20, 50, 100, 500, 600, 700, 800, 900, 1000, or more amino acids of the amino acid sequence shown in SEQ ID NO:38 and SEQ ID NO: 12. In one embodiment, the HLA-A-ROS1 fusion comprises an amino acid sequence containing at least 5, 10, 20, 50, 100, 500, 600, 700, 800, 900, 1000, or more contiguous amino acids of the amino acid sequence shown in SEQ ID NO:38 and at least 5, 10, 20, 50, 100, 500, 600, 700, 800, 900, 1000, or more contiguous amino acids of the amino acid sequence shown in SEQ ID NO:12. In one embodiment, the 5′ HLA-A-3′ ROS1 fusion polypeptide includes a receptor tyrosine kinase domain or a functional fragment thereof. In an embodiment, the 5′HLA-A-3′ROS1 fusion polypeptide comprises sufficient ROS1 and sufficient HLA-A sequence such that it has kinase activity. e.g., has elevated activity. In any event, the fusion causes activation in the cells harboring it of oncogenic signaling pathways.

[0509] In another aspect, the invention features a HLA-A-ROS1 fusion polypeptide (e.g., a purified HLA-A-ROS1 fusion polypeptide), a biologically active or antigenic fragment thereof, as well as reagents (e.g., antibody molecules that bind to a HLA-A-ROS1 fusion polypeptide), methods for modulating a HLA-A-ROS1 polypeptide activity and detection of a HLA-A-ROS1 polypeptide.

[0510] In one embodiment, the HLA-A-ROS1 fusion polypeptide has at least one biological activity. In one embodiment, at least one biological activity of the HLA-A-ROS1 fusion polypeptide is reduced or inhibited by an anti-cancer drug, e.g., a HLA-A inhibitor, a ROS1 inhibitor. In one embodiment, at least one biological activity of the HLA-A-ROS1 fusion polypeptide is reduced or inhibited by a ROS1 inhibitor. In one embodiment, at least one biological activity of the HLA-A-ROS1 fusion polypeptide is reduced or inhibited by a HLA-A inhibitor. In one embodiment, at least one biological activity of the HLA-A-ROS1 fusion polypeptide is reduced or inhibited by a ROS1 inhibitor, e.g., Ganetespib; Crizotinib; TAE684; a dual ALK and ROS1 inhibitor.

[0511] In yet other embodiments, the HLA-A-ROS1 fusion polypeptide is encoded by a nucleic acid molecule described herein. In one embodiment, the HLA-A-ROS1 fusion polypeptide is encoded by an in-frame fusion of intron 7 of HLA-A with intron 33 of ROS1 (e.g., a sequence on chromosome 12 and a sequence on chromosome 6. In another embodiment, the HLA-A-ROS1 fusion polypeptide includes an amino acid sequence encoded by a nucleotide sequence comprising a fusion junction between the HLA-A transcript and the ROS1 transcript.

[0512] In certain embodiments, the HLA-A-ROS1 fusion polypeptide comprises one or more of encoded exons 1-7 from HLA-A and one or more of encoded exons 34-43 of ROS1. In certain embodiments, the HLA-A-ROS1 fusion polypeptide comprises at least 1, 2, 3, 4, 5, 6, 7 or more encoded exons of HLA-A and at least at least 1, 2, 3, 4, 5, 6, 7, 8, 9, 10 or more encoded exons of ROS1. In certain embodiments, the HLA-A-ROS1 fusion polypeptide comprises a fusion of encoded exon 7 from HLA-A and encoded exon 34 from ROS1 (or a fragment thereof). In other embodiments, the fusion comprises at least 1, 2, 3, 4, 5, 6, 7 or more encoded exons of HLA-A; and at least 1, 2, 3, 4, 5, 6, 7, 8, 9, 10 or more encoded exons of ROS1. In certain embodiments, the HLA-A-ROS1 fusion polypeptide comprises encoded exons 1-7 from HLA-A and exons 34-43 of ROS1. In certain embodiments, the 5′ HLA-A-3′ ROS1 fusion polypeptide comprises a fusion junction of the sequence of exon 7 from HLA-A and the sequence of exon 34 from ROS1.

[0513] In certain embodiments, the HLA-A-ROS1 fusion comprises the amino acid sequence corresponding to exon 7 or a fragment thereof from HLA-A, and the amino acid sequence corresponding to exon 34 or a fragment thereof from ROS1 (e.g., as shown in SEQ ID NO:38 and SEQ ID NO:12. In one embodiment, the HLA-A-ROS1 fusion comprises at least 5, 10, 15, 20 or more amino acids from exon 7 of HLA-A (e.g., from the amino acid sequence of HLA-A preceding the fusion junction with ROS1, e.g., of the HLA-A sequence shown in EQ ID NO:38, and at least 5, 10, 15, 20 or more amino acids from exon 34 of ROS1 (e.g., from the amino acid sequence of ROS1 following the fusion junction with HLA-A, e.g., of the ROS1 sequence shown in SEQ ID NO: 12.

[0514] In one embodiment, the HLA-A-ROS1 fusion polypeptide includes a tyrosine kinase domain or a functional fragment thereof. In a related aspect, the invention features HLA-A-ROS1 fusion polypeptide or fragments operatively linked to heterologous polypeptides to form fusion proteins.

[0515] In another embodiment, the HLA-A-ROS1 fusion polypeptide or fragment is a peptide, e.g., an immunogenic peptide or protein containing a fusion junction described herein. Such immunogenic peptides or proteins can be used to raise antibodies specific to the fusion protein. In other embodiments, such immunogenic peptides or proteins can be used for vaccine preparation. The vaccine preparation can include other components, e.g., an adjuvant.

[0516] In another aspect, the invention features antibody molecules that bind to a HLA-A-ROS1 fusion polypeptide or fragment described herein. In embodiments, the antibody can distinguish wild type ROS1 (or HLA-A) from HLA-A-ROS1.

### Detection Reagents and Detection of Mutations

[0517] In another aspect, the invention features a detection reagent, e.g., a purified or an isolated preparation thereof. Detection reagents can distinguish a nucleic acid, or protein sequence, having a breakpoint, e.g., a HLA-A-ROS1 breakpoint; from a reference sequence. In one embodiment, the detection reagent detects (e.g., specifically detects) a HLA-A-ROS1 fusion nucleic acid or a polypeptide, e.g., distinguishes a wild type ROS1 or another ROS1 fusion (or HLA-A) from a HLA-A-ROS1 nucleic acid (e.g., as described herein in SEQ ID NO:37 and SEQ ID NO: 12); or a HLA-A-ROS1 polypeptide (e.g., as described herein in SEQ ID NO:38 and SEQ ID NO:12).

[0518] Detection reagents, e.g., nucleic acid-based detection reagents, can be used to identify mutations in a target nucleic acid, e.g., DNA, e.g., genomic DNA or cDNA, or RNA, e.g., in a sample, e.g., a sample of nucleic acid derived from a neoplastic or tumor cell, e.g., a melanocytic neoplasm, melanoma or metastatic cell. Detection reagents, e.g., antibody-based detection reagents, can be used to identify the foregoing fusion mutations in a target protein, e.g., in a sample, e.g., a sample of protein derived from, or produced by, a neoplastic or tumor cell, e.g., a melanocytic neoplasm, melanoma or metastatic cell.

### Method of Treatment

[0519] In a related aspect, a method of inhibiting, reducing, or treating a hyperproliferative disorder, e.g., a neoplasm (including benign, pre-malignant or malignant (e.g., a cancer), in a subject is provided. The method includes administering to the subject a preselected therapeutic agent, e.g., an anti-cancer agent (e.g., a kinase inhibitor), as a single agent, or in combination, in an amount sufficient to reduce, inhibit or treat the activity or expression of HLA-A-ROS1 (e.g., a HLA-A-ROS1 fusion described herein), thereby inhibiting, reducing, or treating the hyperproliferative disorder in the subject.

[0520] In one embodiment, the subject treated has a HLA-A-ROS1 fusion; e.g., the subject has a tumor or cancer harboring a HLA-A-ROS1 fusion. In other embodiments, the subject has been previously identified as having a HLA-A-ROS1 fusion. In yet other embodiments, the subject has been previously identified as being likely or unlikely to respond to treatment with a protein kinase inhibitor, e.g., a subject that has previously participated in a clinical trial. In other embodiments, the subject has been previously identified as being likely or unlikely to respond to treatment with a protein kinase inhibitor, based on the presence of the HLA-A-ROS1 fusion. In one embodiment, the subject is a mammal, e.g., a human. In one embodiment, the subject has, or at risk of having a cancer at any stage of disease. In other embodiments, the subject is a patient, e.g., a cancer patient.

[0521] In certain embodiments, the neoplasm or neoplastic cell is a benign, pre-malignant, malignant (cancer) or metastasis. In certain embodiments, the cancer is a solid tumor, a soft tissue tumor, or a metastatic lesion.

[0522] In one embodiment, the neoplasm or neoplastic cell is a benign, pre-malignant, malignant (cancer) or metastasis. In certain embodiments, the cancer is a solid tumor, a soft tissue tumor, or a metastatic lesion. In one embodiment, the cancer is a carcinoma. In one embodiment, the cancer is chosen from a lung cancer, a pancreatic cancer, melanoma, a colorectal cancer, an esophageal-gastric cancer, a thyroid cancer, or an adenocarcinoma. In one embodiment, the cancer is a lung adenocarcinoma. In other embodiment, the lung cancer is chosen from one or more of the following: non-small cell lung cancer (NSCLC), small cell lung cancer SCLC), squamous cell carcinoma SCC), adenocarcinoma of the lung, bronchogenic carcinoma, or a combination thereof. In one embodiment, the lung cancer is NSCLC or SCC.

[0523] In one embodiment, the anti-cancer agent is a ROS1 inhibitor. In one embodiment, the anti-cancer agent is a HLA-A inhibitor. In one embodiment, the anti-cancer agent is a kinase inhibitor. In one embodiment, the anti-cancer agent is a ROS1 inhibitor, e.g., Ganetespib; Crizotinib; TAE684; a dual ALK and ROS1 inhibitor.

### ERC1-ROS1 Fusions

[0524] In one embodiment, a fusion includes an in-frame fusion of an exon of ELKS/RAB6-interacting/CAST family member 1 (ERC1, e.g., one more exons of ERC1 (e.g., one or more of exons 1-111 of ERC1 or a fragment thereof, and an exon of C-Ros oncogene 1 (ROS1, e.g., one or more exons of a ROS1 (e.g., one or more of exons 36-43 of ROS1 or a fragment thereof. For example, the ERC1-ROS1 fusion can include an in-frame fusion within an intron of ERC1 (e.g., intron 11 or a fragment thereof, with an intron of ROS1 (e.g., intron 35 or a fragment thereof. In one embodiment, the fusion of the ERC1-ROS1 fusion comprises the nucleotide sequence of: chromosome 12 at one or more of a nucleotide (plus or minus 10, 20, 30, 50, 60, 70, 80, 100 or more nucleotides) and chromosome 6 at one or more of a nucleotide (plus or minus 10, 20, 30, 50, 60, 70, 80, 100 or more nucleotides). In one embodiment, the ERC1-ROS1 fusion is a translocation, e.g., a translocation of a portion of chromosome 6 and a portion of chromosome 6.

[0525] In certain embodiments, the ERC1-ROS1 fusion is in a 5′-ERC1 to 3′-ROS1 configuration (also referred to herein as “5′-ERC1-ROS1-3′).” The term “fusion” or “fusion molecule” anywhere in this specification can refer to a polypeptide or a nucleic acid fusion, depending on the context. It may include a full-length sequence of a fusion or a fragment thereof, e.g., a fusion junction (e.g., a fragment including a portion of ERC1 and a portion of ROS1, e.g., a portion of the ERC1-ROS1 fusion described herein). In one embodiment, the ERC1-ROS1 fusion polypeptide includes a fragment of the amino acid sequence shown in SEQ ID NO:42 and a fragment of the amino acid sequence shown in SEQ ID NO: 12, or an amino acid sequence substantially identical thereto. In another embodiment, the ERC1-ROS1 fusion nucleic acid includes a fragment of the nucleotide sequence shown in SEQ ID NO:41 and a fragment of the nucleotide sequence shown in SEQ ID NO: 11, or a nucleotide sequence substantially identical thereto. In one embodiment, the ERC1-ROS fusion polypeptide comprises sufficient ERC1 and sufficient ROS1 sequence such that the 5′ ERC1-3′ ROS1 fusion has kinase activity, e.g., has elevated activity, e.g., tyrosine kinase activity. In any event, the fusion causes activation in the cells harboring it of oncogenic signaling pathways.

[0526] In certain embodiments, the ERC1-ROS1 fusion comprises one or more (or all of) exons 1-11 from ERC1 and one or more (or all of) exons 36-43 of ROS1 (e.g., one or more of the exons shown in SEQ ID NO:41 and SEQ ID NO: 11. In another embodiment, the ERC1-ROS1 fusion comprises one or more (or all of) exons 1-11 of ERC1 and one or more (or all of) exons 36-43 of ROS1. In certain embodiments, the ERC1-ROS1 fusion comprises at least 1, 2, 3, 4, 5, 6, 7, 8, 9, 10, 11 or more exons (or encoded exons) from ERC1 and at least 1, 2, 3, 4, 5, 6, 7, 8 or more exons (or encoded exons) from ROS1 (e.g., from the ERC1 and ROS1 sequences shown in SEQ ID NO:41 and SEQ ID NO:42 and SEQ ID NO:11 and SEQ ID NO:12.

[0527] In certain embodiments, the ERC1-ROS1 fusion comprises exons 1-11 or a fragment thereof from ERC1, and exons 36-43 or a fragment thereof from ROS1 (e.g., as shown in SEQ ID NO:41 and SEQ ID NO: 11. In one embodiment, the ERC1-ROS1 fusion comprises at least 5, 10, 15, 20, 30, 40, 50 or more amino acids from exons 1-11 of ERC1 (e.g., from the amino acid sequence of ERC1 as shown in SEQ ID NO:42 (e.g., from the amino acid sequence of ERC1 preceding the fusion junction with ROS1, and at least 5, 10, 15, 20, 30, 40, 50 or more amino acids from exons 36-43 of ROS1 (e.g., from the amino acid sequence of ROS1 as shown in SEQ ID NO:12. In another embodiment, the ERC1-ROS1 fusion comprises at least 6, 12, 15, 20, 25, 50, 75, 100 or more nucleotides from exons 1-11of ERC1 (e.g., from the nucleotide sequence of ERC1 as shown in SEQ ID NO:41 (e.g., from the nucleotide sequence of ERC1 preceding the fusion junction with ROS1; and at least 6, 12, 15, 20, 25, 50, 75, 100 or more nucleotides from exons 36-43 of ROS1 (e.g., from the nucleotide sequence of ROS1 as shown in SEQ ID NO:11.

### ERC1-ROS1 Nucleic Acid Molecules

[0528] In one aspect, the invention features a nucleic acid molecule (e.g., an isolated or purified) nucleic acid molecule that includes a fragment of an ERC1 gene and a fragment of a ROS1 gene. In one embodiment, the nucleotide sequence encodes an ERC1-ROS1 fusion polypeptide that includes a tyrosine kinase domain or a functional fragment thereof. In another embodiment, the nucleotide sequence encodes a fragment of the ROS1 polypeptide including the amino acid sequence of SEQ ID NO: 12 or a fragment thereof, or a sequence substantially identical thereto. In other embodiments, the nucleic acid molecule includes a fragment of the ERC1 gene encoding the amino acid sequence of SEQ ID NO:42 or a fragment thereof, or a sequence substantially identical thereto. In yet other embodiments, the nucleic acid molecule includes a nucleotide sequence encoding the amino acid sequence shown in SEQ ID NO:42, or a fragment thereof, and the amino acid sequence shown in SEQ ID NO: 12 or a fragment thereof, or a sequence substantially identical thereto.

[0529] In one embodiment, the nucleic acid molecule includes a fusion, e.g., an in-frame fusion, between an intron of ERC1 (e.g., intron 11, or a fragment thereof), and an intron of ROS1 (e.g., intron 35, or a fragment thereof). The ERC1-ROS1 fusion can comprise a fusion of the nucleotide sequence of: chromosome 12 at one or more of a nucleotide (plus or minus 10, 20, 30, 50, 60, 70, 80, 100 nucleotides) and chromosome 6 at one or more of a nucleotide (plus or minus 10, 20, 30, 50, 60, 70, 80, 100 nucleotides), or a fragment thereof. In one embodiment, the ERC1-ROS1 fusion comprises a fusion of the nucleotide sequence of: chromosome 6 at one or more of a nucleotide (plus or minus 10, 20, 30, 50, 60, 70, 80, 100 nucleotides) and chromosome 6 at one or more of a nucleotide (plus or minus 10, 20, 30, 50, 60, 70, 80, 100 nucleotides), or a fragment thereof.

[0530] In another embodiment, the ERC1-ROS1 fusion comprises a nucleotide sequence (e.g., a fragment of a nucleotide sequence) shown in SEQ ID NO:41 and a nucleotide sequence (e.g., a fragment of a nucleotide sequence) shown in SEQ ID NO: 11, or a fragment of the fusion. In one embodiment, the ERC1-ROS1 fusion comprises a nucleotide sequence substantially identical to the nucleotide sequence (e.g., a fragment of a nucleotide sequence) shown in SEQ ID NO:41 and the nucleotide sequence (e.g., a fragment of a nucleotide sequence) shown SEQ ID NO: 11, or a fragment of the fusion. In one embodiment, the ERC1-ROS1 fusion comprises a nucleotide sequence at least 70%, at least 75%, at least 80%, at least 85%, at least 90%, at least 95%, at least 99%, at least 99.5 or greater, identical to the nucleotide sequence (e.g., a fragment of a nucleotide sequence) shown in SEQ ID NO:41 and to the nucleotide sequence (e.g., a fragment of a nucleotide sequence) shown in SEQ ID NO: 11. In one embodiment, the ERC1-ROS1 fusion comprises a nucleotide sequence containing at least 25, 50, 100, 150, 200, 500, 1000, 1500, 2000, 2500, 3000, or more nucleotides of the nucleotide sequence shown in SEQ ID NO:41 and a nucleotide sequence containing at least 25, 50, 100, 150, 200, 500, 1000, 1500, 2000, 2500, 3000, or more nucleotides of the nucleotide sequence shown in SEQ ID NO:11. In one embodiment, the ERC1-ROS1 fusion comprises a nucleotide sequence containing at least 25, 50, 100, 150, 200, 500, 1000, 1500, 2000, 2500, 3000, or more contiguous nucleotides of the nucleotide sequence shown in SEQ ID NO:41 and a nucleotide sequence containing at least 25, 50, 100, 150, 200, 500, 10(00), 1500, 2000, 2500, 3000, or more nucleotides of the nucleotide sequence shown in SEQ ID NO: 11.

[0531] In another embodiment, the nucleic acid molecule includes a fusion, e.g., an in-frame fusion, of at least 1, 2, 3, 4, 5, 6, 7, 8, 9, 10, 11 or more exons of ERC1 or a fragment thereof (e.g., one or more of exons 1-11 of ERC1 or a fragment thereof), and at least 1, 2, 3, 4, 5, 6, 7, 8 or more exons of ROS1 or a fragment thereof (e.g., one or more of exons 36-43 of ROS1 or a fragment thereof). In yet other embodiments, the nucleic acid molecule includes a fragment the nucleotide sequence shown in SEQ ID NO:41 and a fragment of the nucleotide sequence shown in SEQ ID NO:11 or a fragment of the fusion, or a sequence substantially identical thereto.

[0532] In one embodiment, the nucleic acid molecule is complementary to at least a portion of a nucleotide sequence disclosed herein, e.g., is capable of hybridizing under a stringency condition described herein to SEQ ID NO:41 and/or SEQ ID NO: 11, or a fragment thereof. In yet another embodiment, the nucleic acid molecule hybridizes to a nucleotide sequence that is complementary to at least a portion of a nucleotide sequence disclosed herein, e.g., is capable of hybridizing under a stringency condition to a nucleotide sequence complementary to SEQ ID NO:41 and/or SEQ ID NO: 11, or a fragment thereof. The nucleotide sequence of a cDNA encoding an exemplary 5′ ERC1-3′ ROS1 fusion is shown in at least exon 11 (e.g., exons 1-11 of SEQ ID NO:41 and at least exon 36 (e.g., exons 36-43 of SEQ ID NO: 11, and the predicted amino acid sequence is shown in the corresponding encoded exons of SEQ ID NO:42 and the corresponding encoded exons of SEQ ID NO: 12, respectively.

[0533] In an embodiment the ERC1-ROS1 nucleic acid molecule comprises sufficient ERC1 and sufficient ROS1 sequence such that the encoded 5′ ERC1-3′ ROS1 fusion has kinase activity, e.g., has elevated activity. For example, in this embodiment, ERC1 has no kinase activity before fusion and ROS1 is not constitutively activated. In certain embodiments, the 5′ ERC1-3′ ROS1 fusion comprises exons 1-11 from ERC1 and exons 36-43 from ROS1. In certain embodiments, the ERC1-ROS1 fusion comprises at least 1, 2, 3, 4, 5, 6, 7, 8, 9, 10, 11 or more exons from ERC1 and at least at least 1, 2, 3, 4, 5, 6, 7, 8 or more exons of ROS1. In certain embodiments, the ERC1-ROS1 fusion comprises a fusion of exon 11 from ERC1 and exon 36 from ROS1. In another embodiment, the ERC1-ROS1 fusion comprises 1, 2, 3, 4, 5, 6, 7, 8, 9, 10, 11 or more exons of ERC1; and at least 1, 2, 3, 4, 5, 6, 7, 8 or more exons of ROS1.

[0534] In one embodiment, the nucleic acid molecule includes a nucleotide sequence that has an in-frame fusion of intron 11 of ERC1 (e.g., NM_{—}178039 with intron 36 of ROS1 (e.g., NM_{—}002944. In another embodiment, the nucleic acid molecule includes a nucleotide sequence that includes a breakpoint. For example, the nucleic acid molecule includes a nucleotide sequence that includes the fusion junction between the ERC1 gene and the ROS1 gene, e.g., the breakpoint between intron 11 of ERC1 and intron 35 of ROS1. In other embodiments, the nucleic acid molecules includes a nucleotide sequence of one or more of nucleotide of chromosome 6 coupled to (e.g., directly or indirectly juxtaposed to) one or more of nucleotide of chromosome 6. In one embodiment, the nucleic acid molecule includes the nucleotide sequence of: chromosome 6 at one or more of a nucleotide plus or minus 10, 20, 30, 40 50, 60, 80, 100, 150 nucleotides and chromosome 6 at one or more of a nucleotide plus or minus 10, 20, 30, 40 50, 60, 80, 100, 150 nucleotides (corresponding to the breakpoint of a ERC1-ROS1 fusion), or a fragment thereof, or a sequence substantially identical thereto. In one embodiment, the nucleic acid molecule is complementary to at least a portion of a nucleotide sequence disclosed herein, e.g., is capable of hybridizing under a stringency condition described herein to SEQ ID NO:41 and/or SEQ ID NO:11 or a fragment thereof. In yet other embodiment, the nucleic acid molecule hybridizes to a nucleotide sequence that is complementary to at least a portion of a nucleotide sequence disclosed herein, e.g., is capable of hybridizing under a stringency condition described herein to a nucleotide sequence complementary to SEQ ID NO:41 or SEQ ID NO:11 or a fragment thereof.

[0535] In another embodiment, the ERC1-ROS1 fusion nucleic acid comprises at least 6, 12, 15, 20, 25, 50, 75, 100 or more nucleotides from exon 11 of ERC1 (e.g., from the nucleotide sequence of ERC1 preceding the fusion junction with ROS1, e.g., of the ERC1 sequence shown in SEQ ID NO:41, and at least 6, 12, 15, 20, 25, 50, 75, 100 or more nucleotides from exon 36 of ROS1 (e.g., from the nucleotide sequence of ROS1 following the fusion junction with ERC1, e.g., of the ROS1 sequence shown in SEQ ID NO:11.

[0536] In other embodiments, the nucleic acid molecule includes a nucleotide sequence encoding a ERC1-ROS1 fusion polypeptide that includes a fragment of a ERC1 gene and a fragment of a ROS gene. In one embodiment, the nucleotide sequence encodes an ERC1-ROS1 fusion polypeptide that includes e.g., a tyrosine kinase domain or a functional fragment thereof. In yet other embodiments, the nucleic acid molecule includes a nucleotide sequence encoding the amino acid sequence (e.g., a fragment of the amino acid sequence) shown in SEQ ID NO:42 and a nucleotide sequence encoding the amino acid sequence (e.g., a fragment of the amino acid sequence) shown in SEQ ID NO:12, or a fragment of the fusion, or a sequence substantially identical thereto. In one embodiment, the encoded ERC1-ROS1 fusion polypeptide includes a tyrosine kinase domain or a functional fragment thereof.

[0537] In one embodiment, the ERC1-ROS1 fusion includes the full sequence or a fragment of the nucleotide sequence shown in SEQ ID NO:39 and SEQ ID NO:88, or a nucleotide sequence substantially identical thereto. In another embodiment, the ERC1-ROS1 fusion polypeptide includes the full sequence or a fragment of the amino acid sequence shown in SEQ ID NO:40 and SEQ ID NO:89, or an amino acid sequence substantially identical thereto.

[0538] In a related aspect, the invention features nucleic acid constructs that include the ERC1-ROS1 nucleic acid molecules described herein. In certain embodiments, the nucleic acid molecules are operatively linked to a native or a heterologous regulatory sequence. Also included are vectors and host cells that include the ERC1-ROS1 nucleic acid molecules described herein, e.g., vectors and host cells suitable for producing the nucleic acid molecules and polypeptides described herein.

[0539] In a related aspect, methods of producing the nucleic acid molecules and polypeptides described herein are also described.

[0540] In another aspect, the invention features nucleic acid molecules that reduce or inhibit the expression of a nucleic acid molecule that encodes an ERC1-ROS1 fusion described herein. Examples of such nucleic acid molecules include, for example, antisense molecules, ribozymes, RNAi, triple helix molecules that hybridize to a nucleic acid encoding ERC1-ROS1, or a transcription regulatory region of ERC1-ROS1, and blocks or reduces mRNA expression of ERC1-ROS1.

### Nucleic Acid Detection and Capturing Reagents

[0541] The invention also features a nucleic acid molecule, e.g., nucleic acid fragment, suitable as probe, primer, bait or library member that includes, flanks, hybridizes to, which are useful for identifying, or are otherwise based on, the ERC1-ROS1 fusions described herein. In certain embodiments, the probe, primer or bait molecule is an oligonucleotide that allows capture, detection or isolation of a ERC1-ROS1 fusion nucleic acid molecule described herein. The oligonucleotide can comprise a nucleotide sequence substantially complementary to a fragment of the ERC1-ROS1 fusion nucleic acid molecules described herein. The sequence identity between the nucleic acid fragment. e.g., the oligonucleotide, and the target ERC1-ROS1 sequence need not be exact, so long as the sequences are sufficiently complementary to allow the capture, detection or isolation of the target sequence. In one embodiment, the nucleic acid fragment is a probe or primer that includes an oligonucleotide between about 5 and 25, e.g., between 10 and 20, or 10 and 15 nucleotides in length. In other embodiments, the nucleic acid fragment is a bait that includes an oligonucleotide between about 100 to 300 nucleotides, 156 and 230 nucleotides, or 150 and 200 nucleotides, in length.

[0542] In one embodiment, the nucleic acid fragment can be used to identify or capture, e.g., by hybridization, an ERC1-ROS1 fusion. For example, the nucleic acid fragment can be a probe, a primer, or a bait, for use in identifying or capturing, e.g., by hybridization, a ERC1-ROS1 fusion described herein. In one embodiment, the nucleic acid fragment can be useful for identifying or capturing a ERC1-ROS1 breakpoint, e.g., the nucleotide sequence of: chromosome 12 at nucleotide plus or minus 10, 20, 30, 40, 50, 60, 80, 100, 150 nucleotides and chromosome 6 at nucleotide plus or minus 10, 20, 30, 40 50, 60, 80, 100, 150 nucleotides.

[0543] In one embodiment, the nucleic acid fragment hybridizes to a nucleotide sequence within a chromosomal rearrangement that creates an in-frame fusion of intron 11 of ERC1 with intron 35 of ROS1. In one embodiment, the nucleic acid fragment hybridizes to a nucleotide sequence in the region In other embodiments, the nucleic acid molecules includes a nucleotide sequence in the region of a nucleotide sequence of chromosome 6 coupled to (e.g., juxtaposed to) nucleotides in the region of a nucleotide sequence of chromosome 6. In one embodiment, the nucleic acid fragment hybridizes to a nucleotide sequence that includes a breakpoint, e.g., the nucleotide sequence of: chromosome 12 at nucleotide plus or minus 10, 20, 30, 40, 50, 60, 80, 100, 150 or more nucleotides and chromosome 6 at nucleotide plus or minus 10, 20, 30, 40, 50, 60, 80, 100, 150 or more nucleotides. For example, the nucleic acid fragment can hybridize to a nucleotide sequence that includes the fusion junction between the ERC1 gene and the ROS1 gene, e.g., a nucleotide sequence that includes a portion of a nucleotide sequence within intron 11 of an ERC1 gene and intron 35 of a ROS1 gene.

[0544] In another embodiment, the nucleic acid fragment hybridizes to a nucleotide sequence that comprises at least 6, 12, 15, 20, 25, 50, 75, 100, 150 or more nucleotides from exon 11 of ERC1 (e.g., from the nucleotide sequence of ERC1 preceding the fusion junction with ROS1, e.g., of the ERC1 sequence shown in SEQ ID NO:41, and at least 6, 12, 15, 20, 25, 50, 75, 100, 150 or more nucleotides from exon 36 of ROS1 (e.g., from the nucleotide sequence of ROS1 following the fusion junction with ERC1, e.g., of the ROS1 sequence shown in SEQ ID NO: 11.

[0545] The probes or primers described herein can be used, for example, for FISH detection or PCR amplification. In one exemplary embodiment where detection is based on PCR, amplification of the ERC1-ROS1 fusion junction fusion junction can be performed using a primer or a primer pair, e.g., for amplifying a sequence flanking the fusion junctions described herein, e.g., the mutations or the junction of a chromosomal rearrangement described herein, e.g., ERC1-ROS1.

[0546] In one embodiment, a pair of isolated oligonucleotide primers can amplify a region containing or adjacent to a position in the ERC1-ROS1 fusion. For example, forward primers can be designed to hybridize to a nucleotide sequence within ERC1 genomic or mRNA sequence (e.g., a nucleotide sequence within exon 11 of ERC1 of SEQ ID NO:41, and the reverse primers can be designed to hybridize to a nucleotide sequence of ROS1 (e.g., a nucleotide sequence within exon 36 of ROS1, of SEQ ID NO: 11.

[0547] In another embodiment, the nucleic acid fragments can be used to identify, e.g., by hybridization, a ERC1-ROS1 fusion. In one embodiment, the nucleic acid fragment hybridizes to a nucleotide sequence that includes a fusion junction between the ERC1 transcript and the ROS1 transcript.

[0548] In other embodiments, the nucleic acid fragment includes a bait that comprises a nucleotide sequence that hybridizes to a ERC1-ROS1 fusion nucleic acid molecule described herein, and thereby allows the capture or isolation said nucleic acid molecule. In one embodiment, a bait is suitable for solution phase hybridization. In other embodiments, a bait includes a binding entity, e.g., an affinity tag, that allows capture and separation, e.g., by binding to a binding entity, of a hybrid formed by a bait and a nucleic acid hybridized to the bait.

[0549] In other embodiments, the nucleic acid fragment includes a library member comprising a ERC1-ROS1 nucleic acid molecule described herein. In one embodiment, the library member includes a rearrangement that results in the ERC1-ROS1 fusion described herein.

[0550] The nucleic acid fragment can be detectably labeled with, e.g., a radiolabel, a fluorescent label, a bioluminescent label, a chemiluminescent label, an enzyme label, a binding pair label, or can include an affinity tag; a tag, or identifier (e.g., an adaptor, barcode or other sequence identifier).

### ERC1-ROS1 Fusion Polypeptides

[0551] In another embodiment, the ERC1-ROS1 fusion comprises an amino acid sequence (e.g., a fragment of the amino acid sequence) shown in SEQ ID NO:42 and an amino acid sequence (e.g., a fragment of the amino acid sequence) shown in SEQ ID NO: 12, or a fragment of the fusion. In one embodiment, the ERC1-ROS1 fusion comprises an amino acid sequence substantially identical to the amino acid sequence (e.g., a fragment of the amino acid sequence) shown in SEQ ID NO:42 and the amino acid sequence (e.g., a fragment of the amino acid sequence) shown in SEQ ID NO:12, or a fragment thereof. In one embodiment, the ERC1-ROS1 fusion comprises an amino acid sequence at least 70%, at least 75%, at least 80%, at least 85%, at least 90%, at least 95%, at least 99%, at least 99.5 or greater, identical to the amino acid sequence (e.g., a fragment of the amino acid sequence) shown in SEQ ID NO:42 and the amino acid sequence (e.g., a fragment of the amino acid sequence) shown in SEQ ID NO:12. In one embodiment, the ERC11-ROS1 fusion comprises a sequence containing at least 10, 20, 50, 100, 500, 600, 700, 800, 900, 1000, or more amino acids of the amino acid sequence shown in SEQ ID NO:42 and SEQ ID NO: 12. In one embodiment, the ERC1-ROS1 fusion comprises an amino acid sequence containing at least 5, 10, 20, 50, 100, 500, 600, 700, 800, 900, 1000, or more contiguous amino acids of the amino acid sequence shown in SEQ ID NO:42 and at least 5, 10, 20, 50, 100, 500, 600, 700, 800, 900, 1000, or more contiguous amino acids of the amino acid sequence shown in SEQ ID NO:12. In one embodiment, the 5′ ERC1-3′ ROS1 fusion polypeptide includes a receptor tyrosine kinase domain or a functional fragment thereof. In an embodiment, the 5′ERC1-3′ROS1 fusion polypeptide comprises sufficient ROS1 and sufficient ERC1 sequence such that it has kinase activity. e.g., has elevated activity compared to a polypeptide that does not encode a kinase sequence or to a polypeptide wherein the kinase sequence is not constitutively “on.” In any event, the fusion causes activation in the cells harboring it of oncogenic signaling pathways.

[0552] In another aspect, the invention features an ERC1-ROS1 fusion polypeptide (e.g., a purified ERC1-ROS1 fusion polypeptide), a biologically active or antigenic fragment thereof, as well as reagents (e.g., antibody molecules that bind to a ERC1-ROS1 fusion polypeptide), methods for modulating a ERC1-ROS1 polypeptide activity and detection of a ERC1-ROS1 polypeptide.

[0553] In one embodiment, the ERC1-ROS1 fusion polypeptide has at least one biological activity. In one embodiment, at least one biological activity of the ERC1-ROS1 fusion polypeptide is reduced or inhibited by an anti-cancer drug, e.g., an ERC1 inhibitor, a ROS1 inhibitor. In one embodiment, at least one biological activity of the ERC1-ROS1 fusion polypeptide is reduced or inhibited by a ROS1 inhibitor. In one embodiment, at least one biological activity of the ERC1-ROS1 fusion polypeptide is reduced or inhibited by an ERC1 inhibitor. In one embodiment, at least one biological activity of the ERC1-ROS1 fusion polypeptide is reduced or inhibited by a ROS1 inhibitor, e.g., Ganetespib; Crizotinib; TAE684; a dual ALK and ROS1 inhibitor.

[0554] In yet other embodiments, the ERC1-ROS1 fusion polypeptide is encoded by a nucleic acid molecule described herein. In one embodiment, the ERC1-ROS1 fusion polypeptide is encoded by an in-frame fusion of intron 11 of ERC1 with intron 35 of ROS1 (e.g., a sequence on chromosome 12 and a sequence on chromosome 6. In another embodiment, the ERC1-ROS1 fusion polypeptide includes an amino acid sequence encoded by a nucleotide sequence comprising a fusion junction between the ERC1 transcript and the ROS1 transcript.

[0555] In certain embodiments, the ERC1-ROS1 fusion polypeptide comprises one or more of encoded exons 1-11 from ERC1 and one or more of encoded exons 36-43 of ROS1. In certain embodiments, the ERC1-ROS1 fusion polypeptide comprises at least 1, 2, 3, 4, 5, 6, 7, 8, 9, 10, 1 or more encoded exons of ERC1 and at least at least 1, 2, 3, 4, 5, 6, 7, 8 or more encoded exons of ROS1. In certain embodiments, the ERC1-ROS1 fusion polypeptide comprises a fusion of encoded exon 1 from ERC1 and encoded exon 36 from ROS1 (or a fragment thereof). In other embodiments, the fusion comprises at least 1, 2, 3, 4, 5, 6, 7, 8, 9, 10, 11 or more encoded exons of ERC1; and at least 1, 2, 3, 4, 5, 6, 7, 8 or more encoded exons of ROS1. In certain embodiments, the ERC1-ROS1 fusion polypeptide comprises encoded exons 1-11 from ERC1 and exons 36-43 of ROS1. In certain embodiments, the 5′ ERC1-3′ ROS1 fusion polypeptide comprises a fusion junction of the sequence of exon 11 from ERC1 and the sequence of exon 36 from ROS1.

[0556] In certain embodiments, the ERC1-ROS1 fusion comprises the amino acid sequence corresponding to exon 11 or a fragment thereof from ERC1 and the amino acid sequence corresponding to exon 36 or a fragment thereof from ROS1 (e.g., as shown in SEQ ID NO:42 and SEQ ID NO:12. In one embodiment, the ERC1-ROS1 fusion comprises at least 5, 10, 15, 20 or more amino acids from exon 11 of ERC1 (e.g., from the amino acid sequence of ERC1 preceding the fusion junction with ROS1, e.g., of the ERC1 sequence shown in EQ ID NO:42, and at least 5, 10, 15, 20 or more amino acids from exon 36 of ROS1 (e.g., from the amino acid sequence of ROS1 following the fusion junction with ERC1, e.g., of the ROS1 sequence shown in SEQ ID NO:12.

[0557] In one embodiment, the ERC1-ROS1 fusion polypeptide includes a tyrosine kinase domain or a functional fragment thereof. In a related aspect, the invention features ERC1-ROS1 fusion polypeptide or fragments operatively linked to heterologous polypeptides to form fusion proteins.

[0558] In another embodiment, the ERC1-ROS1 fusion polypeptide or fragment is a peptide, e.g., an immunogenic peptide or protein containing a fusion junction described herein. Such immunogenic peptides or proteins can be used to raise antibodies specific to the fusion protein. In other embodiments, such immunogenic peptides or proteins can be used for vaccine preparation. The vaccine preparation can include other components, e.g., an adjuvant.

[0559] In another aspect, the invention features antibody molecules that bind to a ERC1-ROS1 fusion polypeptide or fragment described herein. In embodiments, the antibody can distinguish wild type ROS1 or ERC1 from ERC1-ROS1.

### Detection Reagents and Detection of Mutations

[0560] In another aspect, the invention features a detection reagent, e.g., a purified or an isolated preparation thereof. Detection reagents can distinguish a nucleic acid, or protein sequence, having a breakpoint, e.g., an ERC1-ROS1 breakpoint; from a reference sequence. In one embodiment, the detection reagent detects (e.g., specifically detects) a ERC1-ROS1 fusion nucleic acid or a polypeptide, e.g., distinguishes a wild type ROS1 or another ROS1 fusion (or ERC1) from a ERC1-ROS1 nucleic acid (e.g., as described herein in SEQ ID NO:41 and SEQ ID NO:12); or a ERC1-ROS1 polypeptide (e.g., as described herein in SEQ ID NO:42 and SEQ ID NO:12).

[0561] Detection reagents, e.g., nucleic acid-based detection reagents, can be used to identify mutations in a target nucleic acid, e.g., DNA, e.g., genomic DNA or cDNA, or RNA. e.g., in a sample, e.g., a sample of nucleic acid derived from a neoplastic or tumor cell, e.g., a melanocytic neoplasm, melanoma or metastatic cell. Detection reagents, e.g., antibody-based detection reagents, can be used to identify mutations in a target protein, e.g., in a sample, e.g., a sample of protein derived from, or produced by, a neoplastic or tumor cell, e.g., a melanocytic neoplasm, melanoma or metastatic cell.

### Method of Treatment

[0562] In a related aspect, a method of inhibiting, reducing, or treating a hyperproliferative disorder, e.g., a neoplasm (including benign, pre-malignant or malignant (e.g., a cancer), in a subject is provided. The method includes administering to the subject a preselected therapeutic agent, e.g., an anti-cancer agent (e.g., a kinase inhibitor), as a single agent, or in combination, in an amount sufficient to reduce, inhibit or treat the activity or expression of ERC1-ROS1 (e.g., an ERC1-ROS1 fusion described herein), thereby inhibiting, reducing, or treating the hyperproliferative disorder in the subject.

[0563] In one embodiment, the subject treated has an ERC1-ROS1 fusion; e.g., the subject has a tumor or cancer harboring a ERC1-ROS1 fusion. In other embodiments, the subject has been previously identified as having an ERC1-ROS1 fusion. In yet other embodiments, the subject has been previously identified as being likely or unlikely to respond to treatment with a protein kinase inhibitor, e.g., a subject that has previously participated in a clinical trial. In other embodiments, the subject has been previously identified as being likely or unlikely to respond to treatment with a protein kinase inhibitor, based on the presence of the ERC1-ROS1 fusion. In one embodiment, the subject is a mammal, e.g., a human. In one embodiment, the subject has, or at risk of having a cancer at any stage of disease. In other embodiments, the subject is a patient, e.g., a cancer patient.

[0564] In certain embodiments, the neoplasm or neoplastic cell is a benign, pre-malignant, malignant (cancer) or metastasis. In certain embodiments, the cancer is a solid tumor, a soft tissue tumor, or a metastatic lesion.

[0565] In one embodiment, the neoplasm or neoplastic cell is a benign, pre-malignant, malignant (cancer) or metastasis. In certain embodiments, the cancer is a solid tumor, a soft tissue tumor, or a metastatic lesion. In one embodiment, the cancer is a carcinoma. In one embodiment, the cancer is chosen from a lung cancer, a pancreatic cancer, melanoma, a colorectal cancer, an esophageal-gastric cancer, a thyroid cancer, or an adenocarcinoma. In one embodiment, the cancer is a lung adenocarcinoma. In other embodiment, the lung cancer is chosen from one or more of the following: non-small cell lung cancer (NSCLC), small cell lung cancer SCLC), squamous cell carcinoma SCC), adenocarcinoma of the lung, bronchogenic carcinoma, or a combination thereof. In one embodiment, the lung cancer is NSCLC or SCC.

[0566] In one embodiment, the anti-cancer agent is a ROS1 inhibitor. In one embodiment, the anti-cancer agent is an ERC1 inhibitor. In one embodiment, the anti-cancer agent is a kinase inhibitor. In one embodiment, the anti-cancer agent is a ROS1 inhibitor, e.g., Ganetespib; Crizotinib; TAE684; a dual ALK and ROS1 inhibitor.

### KIAA1598-ROS1

[0567] In one embodiment, a fusion includes an in-frame fusion of an exon of Shootin-1 (KIAA1598, e.g., one more exons of KIAA1598 (e.g., one or more of exons 1-1111 of KIAA1598 or a fragment thereof, and an exon of C-Ros oncogene 1 (ROS1, e.g., one or more exons of a ROS1 (e.g., one or more of exons 36-43 of ROS1 or a fragment thereof. For example, the KIAA1598-ROS1 fusion can include an in-frame fusion within an intron of KIAA1598 (e.g., intron 11 or a fragment thereof, with an intron of ROS1 (e.g., intron 35 or a fragment thereof. In one embodiment, the fusion of the KIAA1598-ROS1 fusion comprises the nucleotide sequence of: chromosome 10 at one or more of a nucleotide (plus or minus 10, 20, 30, 50, 60, 70, 80, 100 or more nucleotides) and chromosome 6 at one or more of a nucleotide (plus or minus 10, 20, 30, 50, 60, 70, 80, 100 or more nucleotides). In one embodiment, the KIAA1598-ROS1 fusion is a translocation, e.g., a translocation of a portion of chromosome 6 and a portion of chromosome 6.

[0568] In certain embodiments, the KIAA1598-ROS1 fusion is in a 5′-KIAA1598 to 3′-ROS1 configuration (also referred to herein as “5′-KIAA1598-ROS1-3′).” The term “fusion” or “fusion molecule” can refer to a polypeptide or a nucleic acid fusion, depending on the context. It may include a full-length sequence of a fusion or a fragment thereof, e.g., a fusion junction (e.g., a fragment including a portion of KIAA1598 and a portion of ROS1, e.g., a portion of the KIAA1598-ROS1 fusion described herein). In one embodiment, the KIAA1598-ROS1 fusion polypeptide includes a fragment of the amino acid sequence shown in SEQ ID NO:65 and a fragment of the amino acid sequence shown in SEQ ID NO:12, or an amino acid sequence substantially identical thereto. In another embodiment, the KIAA1598-ROS1 fusion nucleic acid includes a fragment of the nucleotide sequence shown in SEQ ID NO:64 and a fragment of the nucleotide sequence shown in SEQ ID NO: 11, or a nucleotide sequence substantially identical thereto. In one embodiment, the KIAA1598-ROS1 fusion polypeptide comprises sufficient KIAA1598 and sufficient ROS1 sequence such that the 5′ KIAA1598-3′ ROS1 fusion has kinase activity, e.g., has elevated activity. e.g., tyrosine kinase activity. In any event, the fusion causes activation in the cells harboring it of oncogenic signaling pathways.

[0569] In certain embodiments, the KIAA1598-ROS1 fusion comprises one or more (or all of) exons 1-11 from KIAA1598 and one or more (or all of) exons 36-43 of ROS1 (e.g., one or more of the exons shown in SEQ ID NO:64 and SEQ ID NO:11. In another embodiment, the KIAA1598-ROS1 fusion comprises one or more (or all of) exons 1-11 of KIAA1598 and one or more (or all of) exons 36-43 of ROS1. In certain embodiments, the KIAA1598-ROS1 fusion comprises at least 1, 2, 3, 4, 5, 6, 7, 8, 9, 10, 11 or more exons (or encoded exons) from KIAA1598 and at least 1, 2, 3, 4, 5, 6, 7, 8 or more exons (or encoded exons) from ROS1 (e.g., from the KIAA1598 and ROS1 sequences shown in SEQ ID NO:64 and SEQ ID NO:65 and SEQ ID NO: 11 and SEQ ID NO: 12.

[0570] In certain embodiments, the KIAA1598-ROS1 fusion comprises exons 1-11 or a fragment thereof from KIAA1598, and exons 36-43 or a fragment thereof from ROS1 (e.g., as shown in SEQ ID NO:64 and SEQ ID NO:11. In one embodiment, the KIAA1598-ROS1 fusion comprises at least 5, 10, 15, 20, 30, 40, 50 or more amino acids from exons 1-11 of KIAA1598 (e.g., from the amino acid sequence of KIAA1598 as shown in SEQ ID NO:65 (e.g., from the amino acid sequence of KIAA1598 preceding the fusion junction with ROS1, and at least 5, 10, 15, 20, 30, 40, 50 or more amino acids from exons 36-43 of ROS1 (e.g., from the amino acid sequence of ROS1 as shown in SEQ ID NO:12. In another embodiment, the KIAA1598-ROS1 fusion comprises at least 6, 12, 15, 20, 25, 50, 75, 100 or more nucleotides from exons 1-11 of KIAA1598 (e.g., from the nucleotide sequence of KIAA1598 as shown in SEQ ID NO:64 (e.g., from the nucleotide sequence of KIAA1598 preceding the fusion junction with ROS1; and at least 6, 12, 15, 20, 25, 50, 75, 100 or more nucleotides from exons 36-43 of ROS1 (e.g., from the nucleotide sequence of ROS1 as shown in SEQ ID NO: 11.

### KIAA1598-ROS1 Nucleic Acid Molecules

[0571] In one aspect, the invention features a nucleic acid molecule (e.g., an isolated or purified) nucleic acid molecule that includes a fragment of a KIAA1598 gene and a fragment of a ROS1 gene. In one embodiment, the nucleotide sequence encodes a KIAA1598-ROS1 fusion polypeptide that includes a tyrosine kinase domain or a functional fragment thereof. In another embodiment, the nucleotide sequence encodes a fragment of the ROS1 polypeptide including the amino acid sequence of SEQ ID NO: 12 or a fragment thereof, or a sequence substantially identical thereto. In other embodiments, the nucleic acid molecule includes a fragment of the KIAA1598 gene encoding the amino acid sequence of SEQ ID NO:65 or a fragment thereof, or a sequence substantially identical thereto. In yet other embodiments, the nucleic acid molecule includes a nucleotide sequence encoding the amino acid sequence shown in SEQ ID NO:65, or a fragment thereof, and the amino acid sequence shown in SEQ ID NO:12 or a fragment thereof, or a sequence substantially identical thereto.

[0572] In one embodiment, the nucleic acid molecule includes a fusion, e.g., an in-frame fusion, between an intron of KIAA1598 (e.g., intron 11, or a fragment thereof), and an intron of ROS1 (e.g., intron 35, or a fragment thereof). The KIAA1598-ROS1 fusion can comprise a fusion of the nucleotide sequence of: chromosome 10 at one or more of a nucleotide (plus or minus 10, 20, 30, 50, 60, 70, 80, 100 nucleotides) and chromosome 6 at one or more of a nucleotide (plus or minus 10, 20, 30, 50, 60, 70, 80, 100 nucleotides), or a fragment thereof. In one embodiment, the KIAA1598-ROS1 fusion comprises a fusion of the nucleotide sequence of: chromosome 6 at one or more of a nucleotide (plus or minus 10, 20, 30, 50, 60, 70, 80, 100 nucleotides) and chromosome 6 at one or more of a nucleotide (plus or minus 10, 20, 30, 50, 60, 70, 80, 100 nucleotides), or a fragment thereof.

[0573] In another embodiment, the KIAA1598-ROS1 fusion comprises a nucleotide sequence (e.g., a fragment of a nucleotide sequence) shown in SEQ ID NO:64 and a nucleotide sequence (e.g., a fragment of a nucleotide sequence) shown in SEQ ID NO: 11, or a fragment of the fusion. In one embodiment, the KIAA1598-ROS1 fusion comprises a nucleotide sequence substantially identical to the nucleotide sequence (e.g., a fragment of a nucleotide sequence) shown in SEQ ID NO:64 and the nucleotide sequence (e.g., a fragment of a nucleotide sequence) shown SEQ ID NO: 11, or a fragment of the fusion. In one embodiment, the KIAA1598-ROS1 fusion comprises a nucleotide sequence at least 70%, at least 75%, at least 80%, at least 85%, at least 90%, at least 95%, at least 99%, at least 99.5 or greater, identical to the nucleotide sequence (e.g., a fragment of a nucleotide sequence) shown in SEQ ID NO:64 and to the nucleotide sequence (e.g., a fragment of a nucleotide sequence) shown in SEQ ID NO: 11. In one embodiment, the KIAA1598-ROS1 fusion comprises a nucleotide sequence containing at least 25, 50, 100, 150, 200, 500, 1000, 1500, 2000, 2500, 3000, or more nucleotides of the nucleotide sequence shown in SEQ ID NO:64 and a nucleotide sequence containing at least 25, 50, 100, 150, 200, 500, 1000, 1500, 2000, 2500, 3000, or more nucleotides of the nucleotide sequence shown in SEQ ID NO:11. In one embodiment, the KIAA1598-ROS1 fusion comprises a nucleotide sequence containing at least 25, 50, 100, 150, 200, 500, 1000, 1500, 2000, 2500, 3000, or more contiguous nucleotides of the nucleotide sequence shown in SEQ ID NO:64 and a nucleotide sequence containing at least 25, 50, 100, 150, 200, 500, 1000, 1500, 2000, 2500, 3000, or more nucleotides of the nucleotide sequence shown in SEQ ID NO: 11.

[0574] In another embodiment, the nucleic acid molecule includes a fusion, e.g., an in-frame fusion, of at least 1, 2, 3, 4, 5, 6, 7, 8, 9, 10, 11 or more exons of KIAA1598 or a fragment thereof (e.g., one or more of exons 1-11 of KIAA1598 or a fragment thereof), and at least 1, 2, 3, 4, 5, 6, 7, 8 or more exons of ROS1 or a fragment thereof (e.g., one or more of exons 36-43 of ROS1 or a fragment thereof). In yet other embodiments, the nucleic acid molecule includes a fragment the nucleotide sequence shown in SEQ ID NO:64 and a fragment of the nucleotide sequence shown in SEQ ID NO: 11 or a fragment of the fusion, or a sequence substantially identical thereto.

[0575] In one embodiment, the nucleic acid molecule is complementary to at least a portion of a nucleotide sequence disclosed herein, e.g., is capable of hybridizing under a stringency condition described herein to SEQ ID NO:64 and/or SEQ ID NO: 11, or a fragment thereof. In yet another embodiment, the nucleic acid molecule hybridizes to a nucleotide sequence that is complementary to at least a portion of a nucleotide sequence disclosed herein, e.g., is capable of hybridizing under a stringency condition to a nucleotide sequence complementary to SEQ ID NO:64 and/or SEQ ID NO: 11, or a fragment thereof. The nucleotide sequence of a cDNA encoding an exemplary 5′ KIAA1598-3′ ROS1 fusion is shown in at least exon 11 (e.g., exons 1-11 of SEQ ID NO:64 and at least exon 36 (e.g., exons 36-43 of SEQ ID NO: 11, and the predicted amino acid sequence is shown in the corresponding encoded exons of SEQ ID NO:65 and the corresponding encoded exons of SEQ ID NO: 12, respectively.

[0576] In an embodiment the KIAA1598-ROS1 nucleic acid molecule comprises sufficient KIAA1598 and sufficient ROS1 sequence such that the encoded 5′ KIAA1598-3′ ROS1 fusion has kinase activity, e.g., has elevated activity. In any event, the fusion causes activation in the cells harboring it of oncogenic signaling pathways. In certain embodiments, the 5′ KIAA1598-3′ ROS1 fusion comprises exons 1-11 from KIAA1598 and exons 36-43 from ROS1. In certain embodiments, the KIAA1598-ROS1 fusion comprises at least 1, 2, 3, 4, 5, 6, 7, 8, 9, 10, 11 or more exons from KIAA1598 and at least at least 1, 2, 3, 4, 5, 6, 7, 8 or more exons of ROS1. In certain embodiments, the KIAA1598-ROS1 fusion comprises a fusion of exon 11 from KIAA1598 and exon 36 from ROS1. In another embodiment, the KIAA1598-ROS1 fusion comprises 1, 2, 3, 4, 5, 6, 7, 8, 9, 10, 11 or more exons of KIAA1598; and at least 1, 2, 3, 4, 5, 6, 7, 8 or more exons of ROS1.

[0577] In one embodiment, the nucleic acid molecule includes a nucleotide sequence that has an in-frame fusion of intron 11 of KIAA1598 (e.g., NM 178039 with intron 36 of ROS1 (e.g., NM 002944. In another embodiment, the nucleic acid molecule includes a nucleotide sequence that includes a breakpoint. For example, the nucleic acid molecule includes a nucleotide sequence that includes the fusion junction between the KIAA1598 gene and the ROS1 gene, e.g., the breakpoint between intron 11 of KIAA1598 and intron 35 of ROS1. In other embodiments, the nucleic acid molecules includes a nucleotide sequence of one or more of nucleotide of chromosome 6 coupled to (e.g., directly or indirectly juxtaposed to) one or more of nucleotide of chromosome 6. In one embodiment, the nucleic acid molecule is complementary to at least a portion of a nucleotide sequence disclosed herein, e.g., is capable of hybridizing under a stringency condition described herein to SEQ ID NO:64 and/or SEQ ID NO: 11 or a fragment thereof. In yet other embodiment, the nucleic acid molecule hybridizes to a nucleotide sequence that is complementary to at least a portion of a nucleotide sequence disclosed herein, e.g., is capable of hybridizing under a stringency condition described herein to a nucleotide sequence complementary to SEQ ID NO:64 or SEQ ID NO: 11 or a fragment thereof.

[0578] In another embodiment, the KIAA1598-ROS1 fusion nucleic acid comprises at least 6, 12, 15, 20, 25, 50, 75, 100 or more nucleotides from exon 11 of KIAA1598 (e.g., from the nucleotide sequence of KIAA1598 preceding the fusion junction with ROS1, e.g., of the KIAA1598 sequence shown in SEQ ID NO:64, and at least 6, 12, 15, 20, 25, 50, 75, 100 or more nucleotides from exon 36 of ROS1 (e.g., from the nucleotide sequence of ROS1 following the fusion junction with KIAA1598, e.g., of the ROS1 sequence shown in SEQ ID NO: 11.

[0579] In other embodiments, the nucleic acid molecule includes a nucleotide sequence encoding a KIAA1598-ROS1 fusion polypeptide that includes a fragment of a KIAA1598 gene and a fragment of a ROS1 gene. In one embodiment, the nucleotide sequence encodes an KIAA1598-ROS1 fusion polypeptide that includes e.g., a tyrosine kinase domain or a functional fragment thereof. In yet other embodiments, the nucleic acid molecule includes a nucleotide sequence encoding the amino acid sequence (e.g., a fragment of the amino acid sequence) shown in SEQ ID NO:65 and a nucleotide sequence encoding the amino acid sequence (e.g., a fragment of the amino acid sequence) shown in SEQ ID NO: 12, or a fragment of the fusion, or a sequence substantially identical thereto. In one embodiment, the encoded KIAA1598-ROS11 fusion polypeptide includes a tyrosine kinase domain or a functional fragment thereof.

[0580] In a related aspect, the invention features nucleic acid constructs that include the KIAA1598-ROS1 nucleic acid molecules described herein. In certain embodiments, the nucleic acid molecules are operatively linked to a native or a heterologous regulatory sequence. Also included are vectors and host cells that include the KIAA1598-ROS1 nucleic acid molecules described herein, e.g., vectors and host cells suitable for producing the nucleic acid molecules and polypeptides described herein.

[0581] In a related aspect, methods of producing the nucleic acid molecules and polypeptides described herein are also described.

[0582] In another aspect, the invention features nucleic acid molecules that reduce or inhibit the expression of a nucleic acid molecule that encodes a KIAA1598-ROS11 fusion described herein. Examples of such nucleic acid molecules include, for example, antisense molecules, ribozymes, RNAi, triple helix molecules that hybridize to a nucleic acid encoding KIAA1598-ROS1, or a transcription regulatory region of KIAA1598-ROS1, and blocks or reduces mRNA expression of KIAA1598-ROS1.

### Nucleic Acid Detection and Capturing Reagents

[0583] The invention also features a nucleic acid molecule, e.g., nucleic acid fragment, suitable as probe, primer, bait or library member that includes, flanks, or hybridizes to the KIAA1598-ROS1 fusions described herein, which is useful for identifying, or is otherwise based on, the KIAA1598-ROS1 fusions described herein. In certain embodiments, the probe, primer or bait molecule is an oligonucleotide that allows capture, detection or isolation of a KIAA1598-ROS1 fusion nucleic acid molecule described herein. The oligonucleotide can comprise a nucleotide sequence substantially complementary to a fragment of the KIAA1598-ROS1 fusion nucleic acid molecules described herein. The sequence identity between the nucleic acid fragment, e.g., the oligonucleotide, and the target KIAA1598-ROS1 sequence need not be exact, so long as the sequences are sufficiently complementary to allow the capture, detection or isolation of the target sequence. In one embodiment, the nucleic acid fragment is a probe or primer that includes an oligonucleotide between about 5 and 25, e.g., between 10 and 20, or 10 and 15 nucleotides in length. In other embodiments, the nucleic acid fragment is a bait that includes an oligonucleotide between about 100 to 300 nucleotides, 204 and 230 nucleotides, or 150 and 200 nucleotides, in length.

[0584] In one embodiment, the nucleic acid fragment can be used to identify or capture. e.g., by hybridization, a KIAA1598-ROS1 fusion. For example, the nucleic acid fragment can be a probe, a primer, or a bait, for use in identifying or capturing, e.g., by hybridization, a KIAA1598-ROS1 fusion described herein. In one embodiment, the nucleic acid fragment can be useful for identifying or capturing a KIAA1598-ROS1 breakpoint, e.g., the nucleotide sequence of: chromosome 10 at nucleotide plus or minus 10, 20, 30, 40, 50, 60, 80, 100, 150 nucleotides and chromosome 6 at nucleotide plus or minus 10, 20, 30, 40 50, 60, 80, 100, 150 nucleotides.

[0585] In one embodiment, the nucleic acid fragment hybridizes to a nucleotide sequence within a chromosomal rearrangement that creates an in-frame fusion of intron 11 of KIAA1598 with intron 35 of ROS1. In one embodiment, the nucleic acid fragment hybridizes to a nucleotide sequence in the fusion region. In other embodiments, the nucleic acid molecules includes a nucleotide sequence in the region of one nucleotide sequence of chromosome 6 coupled to (e.g., juxtaposed to) nucleotides in the region of another nucleotide sequence of chromosome 6. In one embodiment, the nucleic acid fragment hybridizes to a nucleotide sequence that includes a breakpoint, e.g., the nucleotide sequence of: chromosome 10 at nucleotide plus or minus 10, 20, 30, 40, 50, 60, 80, 100, 150 or more nucleotides and chromosome 6 at nucleotide plus or minus 10, 20, 30, 40, 50, 60, 80, 100, 150 or more nucleotides. For example, the nucleic acid fragment can hybridize to a nucleotide sequence that includes the fusion junction between the KIAA1598 gene and the ROS1 gene, e.g., a nucleotide sequence that includes a portion of a nucleotide sequence within intron 11 of an KIAA1598 gene and intron 35 of a ROS1 gene.

[0586] In another embodiment, the nucleic acid fragment hybridizes to a nucleotide sequence that comprises at least 6, 12, 15, 20, 25, 50, 75, 100, 150 or more nucleotides from exon 11 of KIAA1598 (e.g., from the nucleotide sequence of KIAA1598 preceding the fusion junction with ROS1, e.g., of the KIAA1598 sequence shown in SEQ ID NO:64, and at least 6, 12, 15, 20, 25, 50, 75, 100, 150 or more nucleotides from exon 36 of ROS1 (e.g., from the nucleotide sequence of ROS1 following the fusion junction with KIAA1598, e.g., of the ROS1 sequence shown in SEQ ID NO: 11.

[0587] In one embodiment, the KIAA1598-ROS1 fusion includes the full sequence or a fragment of the nucleotide sequence shown in SEQ ID NO:74, or a nucleotide sequence substantially identical thereto. In another embodiment, the KIAA1598-ROS1 fusion polypeptide includes the full sequence or a fragment of the amino acid sequence shown in SEQ ID NO:75, or an amino acid sequence substantially identical thereto.

[0588] The probes or primers described herein can be used, for example, for FISH detection or PCR amplification. In one exemplary embodiment where detection is based on PCR, amplification of the KIAA1598-ROS1 fusion junction fusion junction can be performed using a primer or a primer pair, e.g., for amplifying a sequence flanking the fusion junctions described herein, e.g., the mutations or the junction of a chromosomal rearrangement described herein, e.g., KIAA1598-ROS1.

[0589] In one embodiment, a pair of isolated oligonucleotide primers can amplify a region containing or adjacent to a position in the KIAA1598-ROS1 fusion. For example, forward primers can be designed to hybridize to a nucleotide sequence within KIAA1598 genomic or mRNA sequence (e.g., a nucleotide sequence within exon 11 of KIAA1598 of SEQ ID NO:64, and the reverse primers can be designed to hybridize to a nucleotide sequence of ROS1 (e.g., a nucleotide sequence within exon 36 of ROS1, of SEQ ID NO:11.

[0590] In another embodiment, the nucleic acid fragments can be used to identify, e.g., by hybridization, a KIAA1598-ROS1 fusion. In one embodiment, the nucleic acid fragment hybridizes to a nucleotide sequence that includes a fusion junction between the KIAA1598 transcript and the ROS1 transcript.

[0591] In other embodiments, the nucleic acid fragment includes a bait that comprises a nucleotide sequence that hybridizes to a KIAA1598-ROS1 fusion nucleic acid molecule described herein, and thereby allows the capture or isolation of said nucleic acid molecule. In one embodiment, a bait is suitable for solution phase hybridization. In other embodiments, a bait includes a binding entity, e.g., an affinity tag, that allows capture and separation, e.g., by binding to a binding entity, of a hybrid formed by a bait and a nucleic acid hybridized to the bait.

[0592] In other embodiments, the nucleic acid fragment includes a library member comprising a KIAA1598-ROS1 nucleic acid molecule described herein. In one embodiment, the library member includes a rearrangement that results in the KIAA1598-ROS1 fusion described herein.

[0593] The nucleic acid fragment can be detectably labeled with, e.g., a radiolabel, a fluorescent label, a bioluminescent label, a chemiluminescent label, an enzyme label, a binding pair label, or can include an affinity tag; a tag, or identifier (e.g., an adaptor, barcode or other sequence identifier).

### KIAA1598-ROS1 Fusion Polypeptides

[0594] In another embodiment, the KIAA1598-ROS1 fusion comprises an amino acid sequence (e.g., a fragment of the amino acid sequence) shown in SEQ ID NO:65 and an amino acid sequence (e.g., a fragment of the amino acid sequence) shown in SEQ ID NO: 12, or a fragment of the fusion. In one embodiment, the KIAA1598-ROS1 fusion comprises an amino acid sequence substantially identical to the amino acid sequence (e.g., a fragment of the amino acid sequence) shown in SEQ ID NO:65 and the amino acid sequence (e.g., a fragment of the amino acid sequence) shown in SEQ ID NO:12, or a fragment thereof. In one embodiment, the KIAA1598-ROS1 fusion comprises an amino acid sequence at least 70%, at least 75%, at least 80%, at least 85%, at least 90%, at least 95%, at least 99%, or at least 99.5 identical to the amino acid sequence (e.g., a fragment of the amino acid sequence) shown in SEQ ID NO:65 and the amino acid sequence (e.g., a fragment of the amino acid sequence) shown in SEQ ID NO:12. In one embodiment, the KIAA1598-ROS1 fusion comprises a sequence containing at least 10, 20, 50, 100, 500, 600, 700, 800, 900, 1000, or more amino acids of the amino acid sequence shown in SEQ ID NO:65 and SEQ ID NO: 12. In one embodiment, the KIAA1598-ROS1 fusion comprises an amino acid sequence containing at least 5, 10, 20, 50, 100, 500, 600, 700, 800, 900, 1000, or more contiguous amino acids of the amino acid sequence shown in SEQ ID NO:65 and at least 5, 10, 20, 50, 100, 500, 600, 700, 800, 900, 1000, or more contiguous amino acids of the amino acid sequence shown in SEQ ID NO:12. In one embodiment, the 5′ KIAA1598-3′ ROS1 fusion polypeptide includes a receptor tyrosine kinase domain or a functional fragment thereof. In an embodiment, the 5′KIAA1598-3′ROS1 fusion polypeptide comprises sufficient ROS1 and sufficient KIAA1598 sequence such that it has kinase activity, e.g., has elevated activity. In any event, the fusion causes activation in the cells harboring it of oncogenic signaling pathways.

[0595] In another aspect, the invention features a KIAA598-ROS1 fusion polypeptide (e.g., a purified KIAA1598-ROS1 fusion polypeptide), a biologically active or antigenic fragment thereof, as well as reagents (e.g., antibody molecules that bind to a KIAA1598-ROS1 fusion polypeptide), methods for modulating a KIAA1598-ROS1 polypeptide activity and detection of a KIAA1598-ROS1 polypeptide.

[0596] In one embodiment, the KIAA1598-ROS1 fusion polypeptide has at least one biological activity. In one embodiment, at least one biological activity of the KIAA1598-ROS1 fusion polypeptide is reduced or inhibited by an anti-cancer drug, e.g., a KIAA1598 inhibitor, a ROS1 inhibitor. In one embodiment, at least one biological activity of the KIAA1598-ROS1 fusion polypeptide is reduced or inhibited by a ROS1 inhibitor. In one embodiment, at least one biological activity of the KIAA1598-ROS1 fusion polypeptide is reduced or inhibited by a KIAA1598 inhibitor. In one embodiment, at least one biological activity of the KIAA1598-ROS1 fusion polypeptide is reduced or inhibited by a ROS1 inhibitor, e.g., Ganetespib; Crizotinib; TAE684; a dual ALK and ROS1 inhibitor.

[0597] In yet other embodiments, the KIAA1598-ROS1 fusion polypeptide is encoded by a nucleic acid molecule described herein. In one embodiment, the KIAA1598-ROS1 fusion polypeptide is encoded by an in-frame fusion of intron 11 of KIAA1598 with intron 35 of ROS1 (e.g., a sequence on chromosome 10 and a sequence on chromosome 6. In another embodiment, the KIAA1598-ROS1 fusion polypeptide includes an amino acid sequence encoded by a nucleotide sequence comprising a fusion junction between the KIAA1598 transcript and the ROS1 transcript.

[0598] In certain embodiments, the KIAA1598-ROS1 fusion polypeptide comprises one or more of encoded exons 1-11 from KIAA1598 and one or more of encoded exons 36-43 of ROS1. In certain embodiments, the KIAA1598-ROS1 fusion polypeptide comprises at least 1, 2, 3, 4, 5, 6, 7, 8, 9, 10, 11 or more encoded exons of KIAA1598 and at least at least 1, 2, 3, 4, 5, 6, 7, 8 or more encoded exons of ROS1. In certain embodiments, the KIAA1598-ROS1 fusion polypeptide comprises a fusion of encoded exon 11 from KIAA1598 and encoded exon 36 from ROS1 (or a fragment thereof). In other embodiments, the fusion comprises at least 1, 2, 3, 4, 5, 6, 7, 8, 9, 10, 11 or more encoded exons of KIAA1598; and at least 1, 2, 3, 4, 5, 6, 7, 8 or more encoded exons of ROS1. In certain embodiments, the KIAA1598-ROS1 fusion polypeptide comprises encoded exons 1-11 from KIAA1598 and exons 36-43 of ROS1. In certain embodiments, the 5′ KIAA1598-3′ ROS1 fusion polypeptide comprises a fusion junction of the sequence of exon 11 from KIAA1598 and the sequence of exon 36 from ROS1.

[0599] In certain embodiments, the KIAA1598-ROS1 fusion comprises the amino acid sequence corresponding to exon 11 or a fragment thereof from KIAA1598, and the amino acid sequence corresponding to exon 36 or a fragment thereof from ROS1 (e.g., as shown in SEQ ID NO:65 and SEQ ID NO:12. In one embodiment, the KIAA1598-ROS1 fusion comprises at least 5, 10, 15, 20 or more amino acids from exon 11 of KIAA1598 (e.g., from the amino acid sequence of KIAA1598 preceding the fusion junction with ROS1, e.g., of the KIAA1598 sequence shown in EQ ID NO:65, and at least 5, 10, 15, 20 or more amino acids from exon 36 of ROS1 (e.g., from the amino acid sequence of ROS1 following the fusion junction with KIAA1598, e.g., of the ROS1 sequence shown in SEQ ID NO: 12.

[0600] In one embodiment, the KIAA1598-ROS1 fusion polypeptide includes a tyrosine kinase domain or a functional fragment thereof. In a related aspect, the invention features KIAA1598-ROS1 fusion polypeptide or fragments operatively linked to heterologous polypeptides to form fusion proteins.

[0601] In another embodiment, the KIAA1598-ROS1 fusion polypeptide or fragment is a peptide, e.g., an immunogenic peptide or protein. The peptide contains a fusion junction described herein. Such immunogenic peptides or proteins can be used to raise antibodies specific to the fusion protein. In other embodiments, such immunogenic peptides or proteins can be used for vaccine preparation. The vaccine preparation can include other components, e.g., an adjuvant.

[0602] In another aspect, the invention features antibody molecules that bind to a KIAA1598-ROS1 fusion polypeptide or fragment described herein. In such embodiments, the antibody can be used as a reagent to distinguish wild type ROS1 (or KIAA1598 from KIAA1598-ROS1.

### Detection Reagents and Detection of Mutations

[0603] In another aspect, the invention features a detection reagent, e.g., a purified or an isolated preparation thereof. Detection reagents can distinguish a nucleic acid, or protein sequence, having a breakpoint, e.g., a KIAA1598-ROS1 breakpoint; from a reference sequence. In one embodiment, the detection reagent detects (e.g., specifically detects) a KIAA1598-ROS1 fusion nucleic acid or a polypeptide, e.g., distinguishes a wild type ROS1 or another ROS1 fusion (or KIAA1598) from a KIAA1598-ROS1 nucleic acid (e.g., as described herein in SEQ ID NO:64 and SEQ ID NO:12); or a KIAA1598-ROS1 polypeptide (e.g., as described herein in SEQ ID NO:65 and SEQ ID NO:12).

[0604] Detection reagents, e.g., nucleic acid-based detection reagents, can be used to identify mutations in a target nucleic acid, e.g., DNA, e.g., genomic DNA or cDNA, or RNA, e.g., in a sample, e.g., a sample of nucleic acid derived from a neoplastic or tumor cell, e.g., a melanocytic neoplasm, melanoma or metastatic cell. Detection reagents, e.g., antibody-based detection reagents, can be used to identify mutations in a target protein, e.g., in a sample, e.g., a sample of protein derived from, or produced by, a neoplastic or tumor cell, e.g., a melanocytic neoplasm, melanoma or metastatic cell.

### Method of Treatment

[0605] In a related aspect, a method of inhibiting, reducing, or treating a hyperproliferative disorder, e.g., a neoplasm (including benign, pre-malignant or malignant (e.g., a cancer), in a subject is provided. The method includes administering to the subject a preselected therapeutic agent. e.g., an anti-cancer agent (e.g., a kinase inhibitor), as a single agent, or in combination with other active agents, in an amount sufficient to reduce, inhibit or treat the activity or expression of KIAA1598-ROS1 (e.g., an KIAA1598-ROS1 fusion described herein), thereby inhibiting, reducing, or treating the hyperproliferative disorder in the subject.

[0606] In one embodiment, the subject treated has a KIAA1598-ROS1 fusion; e.g., the subject has a tumor or cancer harboring a KIAA1598-ROS1 fusion. In other embodiments, the subject has been previously identified as having an KIAA1598-ROS1 fusion. In yet other embodiments, the subject has been previously identified as being likely or unlikely to respond to treatment with a protein kinase inhibitor, e.g., a subject that has previously participated in a clinical trial. In other embodiments, the subject has been previously identified as being likely or unlikely to respond to treatment with a protein kinase inhibitor, based on the presence of the KIAA1598-ROS1 fusion. In one embodiment, the subject is a mammal, e.g., a human. In one embodiment, the subject has, or at risk of having a cancer at any stage of disease. In other embodiments, the subject is a patient, e.g., a cancer patient.

[0607] In certain embodiments, the neoplasm or neoplastic cell is a benign, pre-malignant, malignant (cancer) or metastasis. In certain embodiments, the cancer is a solid tumor, a soft tissue tumor, or a metastatic lesion.

[0608] In one embodiment, the neoplasm or neoplastic cell is a benign, pre-malignant, malignant (cancer) or metastasis. In certain embodiments, the cancer is a solid tumor, a soft tissue tumor, or a metastatic lesion. In one embodiment, the cancer is a carcinoma. In one embodiment, the cancer is chosen from a lung cancer, a pancreatic cancer, melanoma, a colorectal cancer, an esophageal-gastric cancer, a thyroid cancer, or an adenocarcinoma. In one embodiment, the cancer is a lung adenocarcinoma. In other embodiment, the lung cancer is chosen from one or more of the following: non-small cell lung cancer (NSCLC), small cell lung cancer SCLC), squamous cell carcinoma SCC), adenocarcinoma of the lung, bronchogenic carcinoma, or a combination thereof. In one embodiment, the lung cancer is NSCLC or SCC.

[0609] In one embodiment, the anti-cancer agent is a ROS1 inhibitor. In one embodiment, the anti-cancer agent is a KIAA1598 inhibitor. In one embodiment, the anti-cancer agent is a kinase inhibitor. In one embodiment, the anti-cancer agent is a ROS1 inhibitor, e.g., Ganetespib; Crizotinib; TAE684; a dual ALK and ROS1 inhibitor.

### DCTN1-ALK Fusions

[0610] In one embodiment, a fusion includes an in-frame fusion of an exon of Dynactin subunit 1 (DCTN1), e.g., one more exons of DCTN1, particularly one or more of exons 1-26 of DCTN1 or a fragment thereof, and an exon of anaplastic lymphoma receptor tyrosine kinase (ALK), e.g., one or more exons of an ALK such as one or more of exons 20-29 of ALK or a fragment thereof. For example, the DCTN1-ALK fusion can include an in-frame fusion within an intron of DCTN1 (e.g., intron 26 or a fragment thereof, with an intron of ALK (e.g., intron 19 or a fragment thereof. In one embodiment, the fusion of the DCTN1-ALK fusion comprises a nucleotide sequence of chromosome 2 at one or more of a nucleotide (plus or minus 10, 20, 30, 50, 60, 70, 80, 100 or more nucleotides) and another nucleotide sequence of chromosome 2 at one or more of a nucleotide (plus or minus 10, 20, 30, 50, 60, 70, 80, 100 or more nucleotides). In one embodiment, the DCTN1-ALK fusion is a translocation, e.g., a translocation of one portion of chromosome 2 and another portion of chromosome 2.

[0611] In certain embodiments, the DCTN1-ALK fusion is in a 5′-DCTN1 to 3′-ALK configuration (also referred to herein as “5′-DCTN1-ALK-3′).” The term “fusion” or “fusion molecule” can refer to a polypeptide or a nucleic acid fusion, depending on the context. It may include a full-length sequence of a fusion or a fragment thereof, e.g., a fusion junction (e.g., a fragment including a portion of DCTN1 and a portion of ALK, e.g., a portion of the DCTN1-ALK fusion described herein). In one embodiment, the DCTN1-ALK fusion polypeptide includes a fragment of the amino acid sequence shown in SEQ ID NO:67 and a fragment of the amino acid sequence shown in SEQ ID NO:7, or an amino acid sequence substantially identical thereto. In another embodiment, the DCTN1-ALK fusion nucleic acid includes a fragment of the nucleotide sequence shown in SEQ ID NO:66 and a fragment of the nucleotide sequence shown in SEQ ID NO:7, or a nucleotide sequence substantially identical thereto. In one embodiment, the DCTN1-ALK fusion polypeptide comprises sufficient DCTN1 and sufficient ALK sequence such that the 5′ DCTN1-3′ ALK fusion has kinase activity, e.g., has elevated activity, e.g., tyrosine kinase activity. In any event, the fusion causes activation in the cells harboring it of oncogenic signaling pathways.

[0612] In certain embodiments, the DCTN1-ALK fusion comprises one or more (or all of) exons 1-26 from DCTN1 and one or more (or all of) exons 20-29 of ALK (e.g., one or more of the exons shown in SEQ ID NO:66 and SEQ ID NO:7). In another embodiment, the DCTN1-ALK fusion comprises one or more (or all of) exons 1-26 of DCTN1 and one or more (or all of) exons 20-29 of ALK. In certain embodiments, the DCTN1-ALK fusion comprises at least 1, 2, 3, 4, 5, 6, 7, 8, 9, 10, 11, 12, 13, 14, 15, 16, 17, 18, 19, 20, 21, 22, 23, 24, 25, 26 or more exons (or encoded exons) from DCTN1 and at least 1, 2, 3, 4, 5, 6, 7, 8, 4, 5, 6, 7, 8, 9, 10 or more exons (or encoded exons) from ALK (e.g., from the DCTN1 and ALK sequences shown in SEQ ID NO:66 and SEQ ID NO:67 and SEQ ID NO:7 and SEQ ID NO:8).

[0613] In certain embodiments, the DCTN1-ALK fusion comprises exons 1-26 or a fragment thereof from DCTN1, and exons 20-29 or a fragment thereof from ALK (e.g., as shown in SEQ ID NO:66 and SEQ ID NO:7). In one embodiment, the DCTN1-ALK fusion comprises at least 5, 10, 15, 20, 30, 40, 50 or more amino acids from exons 1-26 of DCTN1 (e.g., from the amino acid sequence of DCTN1 as shown in SEQ ID NO:67, particularly from the amino acid sequence of DCTN1 preceding the fusion junction with ALK), and at least 5, 10, 15, 20, 30, 40, 50 or more amino acids from exons 20-29 of ALK (e.g., from the amino acid sequence of ALK as shown in SEQ ID NO:7). In another embodiment, the DCTN1-ALK fusion comprises at least 6, 12, 15, 20, 25, 50, 75, 100 or more nucleotides from exons 1-26 of DCTN1 (e.g., from the nucleotide sequence of DCTN1 as shown in SEQ ID NO:66, particularly from the nucleotide sequence of DCTN1 preceding the fusion junction with ALK); and at least 6, 12, 15, 20, 25, 50, 75, 100 or more nucleotides from exons 20-29 of ALK (e.g., from the nucleotide sequence of ALK as shown in SEQ ID NO:7).

### DCTN1-ALK Nucleic Acid Molecules

[0614] In one aspect, the invention features a nucleic acid molecule (e.g., an isolated or purified) nucleic acid molecule that includes a fragment of a DCTN1 gene and a fragment of an ALK gene. In one embodiment, the nucleotide sequence encodes a DCTN1-ALK fusion polypeptide that includes a tyrosine kinase domain or a functional fragment thereof. In another embodiment, the nucleotide sequence encodes a fragment of the ALK polypeptide including the amino acid sequence of SEQ ID NO:7 or a fragment thereof, or a sequence substantially identical thereto. In other embodiments, the nucleic acid molecule includes a fragment of the DCTN1 polynucleotide encoding the amino acid sequence of SEQ ID NO:67 or a fragment thereof, or a sequence substantially identical thereto. In yet other embodiments, the nucleic acid molecule includes a nucleotide sequence encoding the amino acid sequence shown in 205 SEQ ID NO:67, or a fragment thereof, and the amino acid sequence shown in 62 SEQ ID NO:7 or a fragment thereof, or a sequence substantially identical thereto.

[0615] In one embodiment, the nucleic acid molecule includes a fusion. e.g., an in-frame fusion, between an intron of DCTN1 (e.g., intron 26, or a fragment thereof), and an intron of ALK (e.g., intron 19, or a fragment thereof). The DCTN1-ALK fusion can comprise a fusion of a nucleotide sequence of chromosome 2 at one or more of a nucleotide (plus or minus 10, 20, 30, 50, 60, 70, 80, 100 nucleotides) and another nucleotide sequence of chromosome 2 at one or more of a nucleotide (plus or minus 10, 20, 30, 50, 60, 70, 80, 100 nucleotides), or a fragment thereof. In one embodiment, the DCTN1-ALK fusion comprises a fusion of a nucleotide sequence of chromosome 2 at one or more of a nucleotide (plus or minus 10, 20, 30, 50, 60, 206, 80, 100 nucleotides) and another nucleotide sequence of chromosome 2 at one or more of a nucleotide (plus or minus 10, 20, 30, 50, 60, 70, 80, 100 nucleotides), or a fragment thereof.

[0616] In another embodiment, the DCTN1-ALK fusion comprises a nucleotide sequence (e.g., a fragment of a nucleotide sequence) shown in SEQ ID NO:66 and a nucleotide sequence (e.g., a fragment of a nucleotide sequence) shown in SEQ ID NO:7, or a fragment of the fusion itself. In one embodiment, the DCTN1-ALK fusion comprises a nucleotide sequence substantially identical to the nucleotide sequence (e.g., a fragment of a nucleotide sequence) shown in SEQ ID NO:66 and the nucleotide sequence (e.g., a fragment of a nucleotide sequence) shown SEQ ID NO:7, or a fragment of the fusion itself. In one embodiment, the DCTN1-ALK fusion comprises a nucleotide sequence at least 70%, at least 75%, at least 80%, at least 85%, at least 90%, at least 95%, at least 99%, at least 99.5 or greater, identical to the nucleotide sequence (e.g., a fragment of a nucleotide sequence) shown in 68 SEQ ID NO:66 and to the nucleotide sequence (e.g., a fragment of a nucleotide sequence) shown in 62 SEQ ID NO:7. In one embodiment, the DCTN1-ALK fusion comprises a nucleotide sequence containing at least 25, 50, 100, 150, 200, 500, 1000, 1500, 2000, 2500, 3000, or more nucleotides of the nucleotide sequence shown in SEQ ID NO:66 and a nucleotide sequence containing at least 25, 50, 100, 150, 200, 500, 1000, 1500, 2000, 2500, 3000, or more nucleotides of the nucleotide sequence shown in SEQ ID NO:7. In one embodiment, the DCTN1-ALK fusion comprises a nucleotide sequence containing at least 25, 50, 100, 150, 200, 500, 1000, 1500, 2000, 2500, 3000, or more contiguous nucleotides of the nucleotide sequence shown in SEQ ID NO:66 and a nucleotide sequence containing at least 25, 50, 100, 150, 200, 500, 1000, 1500, 2000, 2500, 3000, or more nucleotides of the nucleotide sequence shown in SEQ ID NO:7.

[0617] In another embodiment, the nucleic acid molecule includes a fusion, e.g., an in-frame fusion, of at least 1, 2, 3, 4, 5, 6, 7, 8, 9, 10, 11, 12, 13, 14, 15, 16, 17, 18, 19, 20, 21, 22, 23, 24, 25, 26 or more exons of DCTN1 or a fragment thereof (e.g., one or more of exons 1-26 of DCTN1 or a fragment thereof), and at least 1, 2, 3, 4, 5, 6, 7, 8, 4, 5, 6, 7, 8, 9, 10 or more exons of ALK or a fragment thereof (e.g., one or more of exons 20-29 of ALK or a fragment thereof). In yet other embodiments, the nucleic acid molecule includes a fragment of the nucleotide sequence shown in SEQ ID NO:66 and a fragment of the nucleotide sequence shown in SEQ ID NO:7 or a fragment of the fusion, or a sequence substantially identical thereto.

[0618] In one embodiment, the nucleic acid molecule is complementary to at least a portion of a nucleotide sequence disclosed herein, e.g., is capable of hybridizing under stringent conditions described herein to SEQ ID NO:66 and/or SEQ ID NO:7, or a fragment thereof. In yet another embodiment, the nucleic acid molecule hybridizes to a nucleotide sequence that is complementary to at least a portion of a nucleotide sequence disclosed herein, e.g., is capable of hybridizing under a stringent condition to a nucleotide sequence complementary to SEQ ID NO:66 and/or SEQ ID NO:7, or a fragment thereof. The nucleotide sequence of a cDNA encoding an exemplary 5′ DCTN1-3′ ALK fusion is shown in at least exons 26 (e.g., exons 1-26 of SEQ ID NO:66 and at least exon 20 (e.g., exons 20-29 of SEQ ID NO:7, and the predicted amino acid sequence is shown in the corresponding encoded exons of SEQ ID NO:67 and the corresponding encoded exons of SEQ ID NO:7, respectively.

[0619] In an embodiment the DCTN1-ALK nucleic acid molecule comprises sufficient DCTN1 and sufficient ALK sequence such that the encoded 5′ DCTN1-3′ ALK fusion has kinase activity, e.g., has elevated activity. In certain embodiments, the 5′ DCTN1-3′ ALK fusion comprises exons 1-26 from DCTN1 and exons 20-29 from ALK. In certain embodiments, the DCTN1-ALK fusion comprises at least 1, 2, 3, 4, 5, 6, 7, 8, 9, 10, 11, 12, 13, 14, 15, 16, 17, 18, 19, 20, 21, 22, 23, 24, 25, 26 or more exons from DCTN1 and at least at least 1, 2, 3, 4, 5, 6, 7, 8, 4, 5, 6, 7, 8, 9, 10 or more exons of ALK. In certain embodiments, the DCTN1-ALK fusion comprises a fusion of exons 26 from DCTN1 and exon 20 from ALK. In another embodiment, the DCTN1-ALK fusion comprises 1, 2, 3, 4, 5, 6, 7, 8, 9, 10, 11, 12, 13, 14, 15, 16, 17, 18, 19, 20, 21, 22, 23, 24, 25, 26 or more exons of DCTN1; and at least 1, 2, 3, 4, 5, 6, 7, 8, 4, 5, 6, 7, 8, 9, 10 or more exons of ALK.

[0620] In one embodiment, the nucleic acid molecule includes a nucleotide sequence that has an in-frame fusion of intron 26 of DCTN1 (e.g., NM_{—}004082 with intron 19 of ALK, e.g., NM_{—}004304). In another embodiment, the nucleic acid molecule includes a nucleotide sequence that includes a breakpoint. For example, the nucleic acid molecule includes a nucleotide sequence that includes the fusion junction between the DCTN1 gene and the ALK gene, e.g., the breakpoint between intron 26 of DCTN1 and intron 19 of ALK. In other embodiments, the nucleic acid molecules includes a nucleotide sequence of one or more of nucleotide of chromosome 2 coupled to (e.g., directly or indirectly juxtaposed to) one or more of nucleotide of chromosome 2. In one embodiment, the nucleic acid molecule includes the nucleotide sequence of: chromosome 2 at one or more of a nucleotide plus or minus 10, 20, 30, 40 50, 60, 80, 100, 150 nucleotides and chromosome 2 at one or more of a nucleotide plus or minus 10, 20, 30, 40 50, 60, 80, 100, 150 nucleotides (corresponding to the breakpoint of a DCTN1-ALK fusion), or a fragment thereof, or a sequence substantially identical thereto. In one embodiment, the nucleic acid molecule is complementary to at least a portion of a nucleotide sequence disclosed herein, e.g., is capable of hybridizing under stringent conditions described herein to SEQ ID NO:66 and/or SEQ ID NO:7 or a fragment thereof. In yet other embodiment, the nucleic acid molecule hybridizes to a nucleotide sequence that is complementary to at least a portion of a nucleotide sequence disclosed herein, e.g., is capable of hybridizing under a stringency condition described herein to a nucleotide sequence complementary to SEQ ID NO:66 or SEQ ID NO:7 or a fragment thereof.

[0621] In another embodiment, the DCTN1-ALK fusion nucleic acid comprises at least 6, 12, 15, 20, 25, 50, 75, 100 or more nucleotides from exons 26 of DCTN1 (e.g., from the nucleotide sequence of DCTN1 preceding the fusion junction with ALK, e.g., of the DCTN1 sequence shown in SEQ ID NO:66), and at least 6, 12, 15, 20, 25, 50, 75, 100 or more nucleotides from exon 20 of ALK (e.g., from the nucleotide sequence of ALK following the fusion junction with DCTN1, e.g., of the ALK sequence shown in SEQ ID NO:7).

[0622] In other embodiments, the nucleic acid molecule includes a nucleotide sequence encoding a DCTN1-ALK fusion polypeptide that includes a fragment of a DCTN1 gene and a fragment of an ALK gene. In one embodiment, the nucleotide sequence encodes a DCTN1-ALK fusion polypeptide that includes e.g., a tyrosine kinase domain or a functional fragment thereof. In yet other embodiments, the nucleic acid molecule includes a nucleotide sequence encoding the amino acid sequence (e.g., a fragment of the amino acid sequence) shown in SEQ ID NO:67 and a nucleotide sequence encoding the amino acid sequence (e.g., a fragment of the amino acid sequence) shown in SEQ ID NO:7, or a fragment of the fusion, or a sequence substantially identical thereto. In one embodiment, the encoded DCTN1-ALK fusion polypeptide includes a tyrosine kinase domain or a functional fragment thereof.

[0623] In a related aspect, the invention features nucleic acid constructs that include the DCTN1-ALK nucleic acid molecules described herein. In certain embodiments, the nucleic acid molecules are operatively linked to a native or a heterologous regulatory sequence. Also included are vectors and host cells that include the DCTN1-ALK nucleic acid molecules described herein, e.g., vectors and host cells suitable for producing the nucleic acid molecules and polypeptides described herein.

[0624] In a related aspect, methods of producing the nucleic acid molecules and polypeptides described herein are also described.

[0625] In another aspect, the invention features nucleic acid molecules that reduce or inhibit the expression of a nucleic acid molecule that encodes a DCTN1-ALK fusion described herein. Examples of such nucleic acid molecules include, for example, antisense molecules, ribozymes, RNAi, triple helix molecules that hybridize to a nucleic acid encoding DCTN1-ALK, or a transcription regulatory region of DCTN1-ALK, and blocks or reduces mRNA expression of DCTN1-ALK.

### Nucleic Acid Detection and Capturing Reagents

[0626] The invention also features a nucleic acid molecule, e.g., nucleic acid fragment, suitable as probe, primer, bait or library member that includes, flanks, or hybridizes to the DCTN1-ALK fusions described herein. Such probe primer bait or library member is useful for identifying, or is otherwise based on, the DCTN1-ALK fusions described herein. In certain embodiments, the probe, primer or bait molecule is an oligonucleotide that allows capture, detection or isolation of a DCTN1-ALK fusion nucleic acid molecule described herein. The oligonucleotide can comprise a nucleotide sequence substantially complementary to a fragment of the DCTN1-ALK fusion nucleic acid molecules described herein. The sequence identity between the nucleic acid fragment, e.g., the oligonucleotide, and the target DCTN1-ALK sequence need not be exact, so long as the sequences are sufficiently complementary to allow the capture, detection or isolation of the target sequence. In one embodiment, the nucleic acid fragment is a probe or primer that includes an oligonucleotide between about 5 and 25, e.g., between 10 and 20, or 10 and 15 nucleotides in length. In other embodiments, the nucleic acid fragment is a bait that includes an oligonucleotide between about 100 to 300 nucleotides, 130 and 230 nucleotides, or 150 and 200 nucleotides, in length.

[0627] In one embodiment, the nucleic acid fragment can be used to identify or capture, e.g., by hybridization, a DCTN1-ALK fusion. For example, the nucleic acid fragment can be a probe, a primer, or a bait, for use in identifying or capturing, e.g., by hybridization, a DCTN1-ALK fusion described herein. In one embodiment, the nucleic acid fragment can be useful for identifying or capturing a DCTN1-ALK breakpoint. e.g., the nucleotide sequence of: chromosome 2 at nucleotide plus or minus 10, 20, 30, 40, 50, 60, 80, 100, 150 nucleotides and chromosome 2 at nucleotide plus or minus 10, 20, 30, 40 50, 60, 80, 100, 150 nucleotides.

[0628] In one embodiment, the nucleic acid fragment hybridizes to a nucleotide sequence within a chromosomal rearrangement that creates an in-frame fusion of intron 26 of DCTN1 with intron 19 of ALK. In one embodiment, the nucleic acid fragment hybridizes to a nucleotide sequence in the fusion region. In other embodiments, the nucleic acid molecules includes a nucleotide sequence of chromosome 2 coupled to (e.g., juxtaposed to) nucleotides in another nucleotide sequence of chromosome 2. In one embodiment, the nucleic acid fragment hybridizes to a nucleotide sequence that includes a breakpoint, e.g., a nucleotide sequence of chromosome 2 at nucleotide plus or minus 10, 20, 30, 40, 50, 60, 80, 100, 150 or more nucleotides and chromosome 2 at nucleotide plus or minus 10, 20, 30, 40, 50, 60, 80, 100, 150 or more nucleotides. For example, the nucleic acid fragment can hybridize to a nucleotide sequence that includes the fusion junction between the DCTN1 gene and the ALK gene, e.g., a nucleotide sequence that includes a portion of a nucleotide sequence within intron 26 of a DCTN1 gene and intron 19 of an ALK gene.

[0629] In another embodiment, the nucleic acid fragment hybridizes to a nucleotide sequence that comprises at least 6, 12, 15, 20, 25, 50, 75, 100, 150 or more nucleotides from exons 26 of DCTN1 (e.g., from the nucleotide sequence of DCTN1 preceding the fusion junction with ALK, e.g., of the DCTN1 sequence shown in SEQ ID NO:66), and at least 6, 12, 15, 20, 25, 50, 75, 100, 150 or more nucleotides from exon 20 of ALK (e.g., from the nucleotide sequence of ALK following the fusion junction with DCTN1, e.g., of the ALK sequence shown in SEQ ID NO:7).

[0630] The probes or primers described herein can be used, for example, for FISH detection or PCR amplification. In one exemplary embodiment where detection is based on PCR, amplification of the DCTN1-ALK fusion junction fusion junction can be performed using a primer or a primer pair, e.g., for amplifying a sequence flanking the fusion junctions described herein, e.g., the mutations or the junction of a chromosomal rearrangement described herein, e.g., DCTN1-ALK.

[0631] In one embodiment, a pair of isolated oligonucleotide primers can amplify a region containing or adjacent to a position in the DCTN1-ALK fusion. For example, forward primers can be designed to hybridize to a nucleotide sequence within DCTN1 genomic or mRNA sequence (e.g., a nucleotide sequence within exons 26 of DCTN1 of SEQ ID NO:66), and the reverse primers can be designed to hybridize to a nucleotide sequence of ALK (e.g., a nucleotide sequence within exon 20 of ALK, of SEQ ID NO:7).

[0632] In another embodiment, the nucleic acid fragments can be used to identify. e.g., by hybridization, a DCTN1-ALK fusion. In one embodiment, the nucleic acid fragment hybridizes to a nucleotide sequence that includes a fusion junction between the DCTN1 transcript and the ALK transcript.

[0633] In other embodiments, the nucleic acid fragment includes a bait that comprises a nucleotide sequence that hybridizes to a DCTN1-ALK fusion nucleic acid molecule described herein, and thereby allows the capture or isolation said nucleic acid molecule. In one embodiment, a bait is suitable for solution phase hybridization. In other embodiments, a bait includes a binding entity, e.g., an affinity tag, that allows capture and separation, e.g., by binding to a binding entity, of a hybrid formed by a bait and a nucleic acid hybridized to the bait.

[0634] In other embodiments, the nucleic acid fragment includes a library member comprising a DCTN1-ALK nucleic acid molecule described herein. In one embodiment, the library member includes a rearrangement that results in a DCTN1-ALK fusion described herein.

[0635] The nucleic acid fragment can be detectably labeled with, e.g., a radiolabel, a fluorescent label, a bioluminescent label, a chemiluminescent label, an enzyme label, a binding pair label, or can include an affinity tag; a tag, or identifier (e.g., an adaptor, barcode or other sequence identifier).

### DCTN1-ALK Fusion Polypeptides

[0636] In another embodiment, the DCTN1-ALK fusion comprises an amino acid sequence (e.g., a fragment of the amino acid sequence) shown in SEQ ID NO:67 and an amino acid sequence (e.g., a fragment of the amino acid sequence) shown in SEQ ID NO:7, or a fragment of the fusion. In one embodiment, the DCTN1-ALK fusion comprises an amino acid sequence substantially identical to the amino acid sequence (e.g., a fragment of the amino acid sequence) shown in SEQ ID NO:67 and the amino acid sequence (e.g., a fragment of the amino acid sequence) shown in SEQ ID NO:7, or a fragment thereof. In one embodiment, the DCTN1-ALK fusion comprises an amino acid sequence at least 70%, at least 75%, at least 80%, at least 85%, at least 90%, at least 95%, at least 99%, at least 99.5 or greater, identical to the amino acid sequence (e.g., a fragment of the amino acid sequence) shown in SEQ ID NO:67 and the amino acid sequence (e.g., a fragment of the amino acid sequence) shown in 62 SEQ ID NO:7. In one embodiment, the DCTN1-ALK fusion comprises a sequence containing at least 10, 20, 50, 100, 500, 600, 700, 800, 900, 1000, or more amino acids of the amino acid sequence shown in SEQ ID NO:67 and SEQ ID NO:7. In one embodiment, the DCTN1-ALK fusion comprises an amino acid sequence containing at least 5, 10, 20, 50, 100, 500, 600, 700, 800, 900, 1000, or more contiguous amino acids of the amino acid sequence shown in SEQ ID NO:67 and at least 5, 10, 20, 50, 100, 500, 600, 700, 800, 900, 1000, or more contiguous amino acids of the amino acid sequence shown in SEQ ID NO:7. In one embodiment, the 5′ DCTN1-3′ ALK fusion polypeptide includes a receptor tyrosine kinase domain or a functional fragment thereof. In an embodiment, the 5′DCTN1-3′ALK fusion polypeptide comprises sufficient ALK and sufficient DCTN1 sequence such that it has kinase activity, e.g., has elevated activity.

[0637] In another aspect, the invention features a DCTN1-ALK fusion polypeptide (e.g., a purified DCTN1-ALK fusion polypeptide), a biologically active or antigenic fragment thereof, as well as reagents (e.g., antibody molecules that bind to a DCTN1-ALK fusion polypeptide), methods for modulating a DCTN1-ALK polypeptide activity and detection of a DCTN1-ALK polypeptide.

[0638] In one embodiment, the DCTN1-ALK fusion polypeptide has at least one biological activity. In one embodiment, at least one biological activity of the DCTN1-ALK fusion polypeptide is reduced or inhibited by an anti-cancer drug, e.g., a DCTN1 inhibitor, an ALK inhibitor. In one embodiment, at least one biological activity of the DCTN1-ALK fusion polypeptide is reduced or inhibited by an ALK inhibitor. In one embodiment, at least one biological activity of the DCTN1-ALK fusion polypeptide is reduced or inhibited by a DCTN1 inhibitor. In one embodiment, at least one biological activity of the DCTN1-ALK fusion polypeptide is reduced or inhibited by an ALK inhibitor, e.g., TAE-684 (also referred to herein as “NVP-TAE694”), PF02341066 (also referred to herein as “crizotinib” or “1066”), AF-802, LDK-378, ASP-3026, CEP-37440, CEP-28122, CEP-108050 and AP26113. Additional examples of ALK kinase inhibitors are described in examples 3-39 of WO 2005016894 by Garcia-Echeverria C, et al.

[0639] In yet other embodiments, the DCTN1-ALK fusion polypeptide is encoded by a nucleic acid molecule described herein. In one embodiment, the DCTN1-ALK fusion polypeptide is encoded by an in-frame fusion of intron 26 of DCTN1 with intron 19 of ALK (e.g., a sequence on chromosome 2 and a sequence on chromosome 2. In another embodiment, the DCTN1-ALK fusion polypeptide includes an amino acid sequence encoded by a nucleotide sequence comprising a fusion junction between the DCTN1 transcript and the ALK transcript.

[0640] In certain embodiments, the DCTN1-ALK fusion polypeptide comprises one or more of encoded exons 1-26 from DCTN1 and one or more of encoded exons 20-29 of ALK. In certain embodiments, the DCTN1-ALK fusion polypeptide comprises at least 1, 2, 3, 4, 5, 6, 7, 8, 9, 10, 11, 12, 13, 14, 15, 16, 17, 18, 19, 20, 21, 22, 23, 24, 25, 26 or more encoded exons of DCTN1 and at least at least 1, 2, 3, 4, 5, 6, 7, 8, 4, 5, 6, 7, 8, 9, 10 or more encoded exons of ALK. In certain embodiments, the DCTN1-ALK fusion polypeptide comprises a fusion of encoded exons 26 from DCTN1 and encoded exon 20 from ALK (or a fragment thereof). In other embodiments, the fusion comprises at least 1, 2, 3, 4, 5, 6, 7, 8, 9, 10, 11, 12, 13, 14, 15, 16, 17, 18, 19, 20, 21, 22, 23, 24, 25, 26 or more encoded exons of DCTN1; and at least 1, 2, 3, 4, 5, 6, 7, 8, 4, 5, 6, 7, 8, 9, 10 or more encoded exons of ALK. In certain embodiments, the DCTN1-ALK fusion polypeptide comprises encoded exons 1-26 from DCTN1 and exons 20-29 of ALK. In certain embodiments, the 5′ DCTN1-3′ ALK fusion polypeptide comprises a fusion junction of the sequence of exons 26 from DCTN1 and the sequence of exon 20 from ALK.

[0641] In certain embodiments, the DCTN1-ALK fusion comprises the amino acid sequence corresponding to exons 26 or a fragment thereof from DCTN1, and the amino acid sequence corresponding to exon 20 or a fragment thereof from ALK (e.g., as shown in SEQ ID NO:67 and SEQ ID NO:7). In one embodiment, the DCTN1-ALK fusion comprises at least 5, 10, 15, 20 or more amino acids from exons 26 of DCTN1 (e.g., from the amino acid sequence of DCTN1 preceding the fusion junction with ALK, e.g., of the DCTN11 sequence shown in SEQ ID NO:67), and at least 5, 10, 15, 20 or more amino acids from exon 20 of ALK (e.g., from the amino acid sequence of ALK following the fusion junction with DCTN1, e.g., of the ALK sequence shown in SEQ ID NO:7).

[0642] In one embodiment, the DCTN1-ALK fusion includes the full sequence or a fragment of the nucleotide sequence shown in SEQ ID NO:76, or a nucleotide sequence substantially identical thereto. In another embodiment, the DCTN1-ALK fusion polypeptide includes the full sequence or a fragment of the amino acid sequence shown in SEQ ID NO:77, or an amino acid sequence substantially identical thereto.

[0643] In one embodiment, the DCTN1-ALK fusion polypeptide includes a tyrosine kinase domain or a functional fragment thereof. In a related aspect, the invention features DCTN1-ALK fusion polypeptide or fragments operatively linked to heterologous polypeptides to form fusion proteins.

[0644] In another embodiment, the DCTN1-ALK fusion polypeptide or fragment is a peptide, e.g., an immunogenic peptide or protein. The peptide contains a fusion junction described herein. Such immunogenic peptides or proteins can be used to raise antibodies specific to the fusion protein. In other embodiments, such immunogenic peptides or proteins can be used for vaccine preparation. The vaccine preparation can include other components, e.g., an adjuvant.

[0645] In another aspect, the invention features antibody molecules that bind to a DCTN1-ALK fusion polypeptide or fragment described herein. In embodiments, the antibody can distinguish wild type ALK (or DCTN1 from DCTN1-ALK.

### Detection Reagents and Detection of Mutations

[0646] In another aspect, the invention features a detection reagent, e.g., a purified or an isolated preparation thereof. Detection reagents can distinguish a nucleic acid, or protein sequence, having a breakpoint, e.g., a DCTN1-ALK breakpoint; from a reference sequence. In one embodiment, the detection reagent detects (e.g., specifically detects) a DCTN1-ALK fusion nucleic acid or a polypeptide, e.g., distinguishes a wild type ALK or another ALK fusion (or DCTN1) from a DCTN1-ALK nucleic acid (e.g., as described herein in SEQ ID NO:66 and SEQ ID NO:7); or a DCTN1-ALK polypeptide (e.g., as described herein in SEQ ID NO:67 and SEQ ID NO:7).

[0647] Detection reagents, e.g., nucleic acid-based detection reagents, can be used to identify mutations in a target nucleic acid. e.g., DNA, e.g., genomic DNA or cDNA, or RNA, e.g., in a sample, e.g., a sample of nucleic acid derived from a neoplastic or tumor cell, e.g., a melanocytic neoplasm, melanoma or metastatic cell. Detection reagents, e.g., antibody-based detection reagents, can be used to identify mutations in a target protein, e.g., in a sample, e.g., a sample of protein derived from, or produced by, a neoplastic or tumor cell, e.g., a melanocytic neoplasm, melanoma or metastatic cell.

### Method of Treatment

[0648] In a related aspect, a method of inhibiting, reducing, or treating a hyperproliferative disorder, e.g., a neoplasm (including benign, pre-malignant or malignant (e.g., a cancer), in a subject is provided. The method includes administering to the subject a preselected therapeutic agent, e.g., an anti-cancer agent (e.g., a kinase inhibitor), as a single agent, or in combination, in an amount sufficient to reduce, inhibit or treat the activity or expression of DCTN1-ALK (e.g., a DCTN1-ALK fusion described herein), thereby inhibiting, reducing, or treating the hyperproliferative disorder in the subject.

[0649] In one embodiment, the subject treated has a DCTN1-ALK fusion; e.g., the subject has a tumor or cancer harboring a DCTN1-ALK fusion. In other embodiments, the subject has been previously identified as having a DCTN1-ALK fusion. In yet other embodiments, the subject has been previously identified as being likely or unlikely to respond to treatment with a protein kinase inhibitor, e.g., a subject that has previously participated in a clinical trial. In other embodiments, the subject has been previously identified as being likely or unlikely to respond to treatment with a protein kinase inhibitor, based on the presence of the DCTN1-ALK fusion. In one embodiment, the subject is a mammal, e.g., a human. In one embodiment, the subject has, or at risk of having a cancer at any stage of disease. In other embodiments, the subject is a patient, e.g., a cancer patient.

[0650] In certain embodiments, the neoplasm or neoplastic cell is a benign, pre-malignant, malignant (cancer) or metastasis. In certain embodiments, the cancer is a solid tumor, a soft tissue tumor, or a metastatic lesion.

[0651] In one embodiment, the neoplasm or neoplastic cell is a benign, pre-malignant, malignant (cancer) or metastasis. In certain embodiments, the cancer is a solid tumor, a soft tissue tumor, or a metastatic lesion. In one embodiment, the cancer is a carcinoma. In one embodiment, the cancer is an adenocarcinoma. In an embodiment, the cancer is a lung adenocarcinoma. In one embodiment, the cancer is chosen from a lung cancer, a pancreatic cancer, melanoma, a colorectal cancer, an esophageal-gastric cancer, a thyroid cancer, or an adenocarcinoma. In one embodiment, the cancer is a lymphoma. In one embodiment, the cancer is an anaplastic large cell lymphoma. In one embodiment, the cancer is an inflammatory myofibrotic tumor. In one embodiment, the cancer is a lung adenocarcinoma. In other embodiment, the lung cancer is chosen from one or more of the following: non-small cell lung cancer (NSCLC), small cell lung cancer SCLC), squamous cell carcinoma SCC), adenocarcinoma of the lung, bronchogenic carcinoma, or a combination thereof. In one embodiment, the lung cancer is NSCLC or SCC.

[0652] In one embodiment, the anti-cancer agent is an ALK inhibitor. In one embodiment, the anti-cancer agent is a DCTN1 inhibitor. In one embodiment, the anti-cancer agent is a kinase inhibitor. In one embodiment, the anti-cancer agent is an ALK inhibitor, e.g., TAE-684 (also referred to herein as “NVP-TAE694”), PF02341066 (also referred to herein as “crizotinib” or “1066”), AF-802, LDK-378, ASP-3026, CEP-37440, CEP-28122, CEP-108050 and AP26113. Additional examples of ALK kinase inhibitors are described in examples 3-39 of WO 2005016894 by Garcia-Echeverria C, et al.

### LSM14A-BRAF Fusions

[0653] In one embodiment, a fusion includes an in-frame fusion of an exon of SCD6 Homolog A (S. cerevisiae), or RNA-Associated Protein 55A (LSM14A), e.g., one more exons of LSM14A (e.g., one or more of exons 1-9 of LSM14A) or a fragment thereof, and an exon of v-raf murine sarcoma viral oncogene homolog B1 (BRAF), e.g., one or more exons of a BRAF (e.g., one or more of exons 9-18 of BRAF) or a fragment thereof. For example, the LSM14A-BRAF fusion can include an in-frame fusion within an intron of LSM14A (e.g., intron 9) or a fragment thereof, with an intron of BRAF (e.g., intron 8) or a fragment thereof. In one embodiment, the fusion of the LSM14A-BRAF fusion comprises the nucleotide sequence of: chromosome 19 at one or more of a nucleotide (plus or minus 10, 20, 30, 50, 60, 70, 80, 100 or more nucleotides) and chromosome 7 at one or more of a nucleotide (plus or minus 10, 20, 30, 50, 60, 70, 80, 100 or more nucleotides). In one embodiment, the LSM14A-BRAF fusion is a translocation, e.g., a translocation of a portion of chromosome 19 and a portion of chromosome 7.

[0654] In certain embodiments, the LSM14A-BRAF fusion is in a 5′-LSM14A to 3′-BRAF configuration (also referred to herein as “5′-LSM14A-BRAF-3′).” The term “fusion” or “fusion molecule” can refer to a polypeptide or a nucleic acid fusion, depending on the context. It may include a full-length sequence of a fusion or a fragment thereof, e.g., a fusion junction (e.g., a fragment including a portion of LSM14A and a portion of BRAF, e.g., a portion of the LSM14A-BRAF fusion described herein). In one embodiment, the LSM14A-BRAF fusion polypeptide includes a fragment of the amino acid sequence shown in SEQ ID NO:69 and a fragment of the amino acid sequence shown in SEQ ID NO:2, or an amino acid sequence substantially identical thereto. In another embodiment, the LSM14A-BRAF fusion nucleic acid includes a fragment of the nucleotide sequence shown in SEQ ID NO:68 and a fragment of the nucleotide sequence shown in SEQ ID NO: 1, or a nucleotide sequence substantially identical thereto. In one embodiment, the LSM14A-BRAF fusion polypeptide comprises sufficient LSM14A and sufficient BRAF sequence such that the 5′ LSM14A-3′ BRAF fusion has kinase activity, e.g., has elevated activity, e.g., tyrosine kinase activity. In any event, the fusion causes activation in the cells harboring it of oncogenic signaling pathways.

[0655] In certain embodiments, the LSM14A-BRAF fusion comprises one or more (or all of) exons 1-9 from LSM14A and one or more (or all of) exons 9-18 of BRAF (e.g., one or more of the exons shown in SEQ ID NO:68 and SEQ ID NO: 1. In another embodiment, the LSM14A-BRAF fusion comprises one or more (or all of) exons 1-9 of LSM14A and one or more (or all of) exons 9-18 of BRAF. In certain embodiments, the LSM14A-BRAF fusion comprises at least 1, 2, 3, 4, 5, 6, 7, 8, 9 or more exons (or encoded exons) from LSM14A and at least 1, 2, 3, 4, 5, 6, 7, 8, 9, 10 or more exons (or encoded exons) from BRAF (e.g., from the LSM14A and BRAF sequences shown in SEQ ID NO:68 and SEQ ID NO:69 and SEQ ID NO: 1 and SEQ ID NO:2.

[0656] In certain embodiments, the LSM14A-BRAF fusion comprises exons 1-9 or a fragment thereof from LSM14A, and exons 9-18 or a fragment thereof from BRAF (e.g., as shown in SEQ ID NO:68 and SEQ ID NO:1). In one embodiment, the LSM14A-BRAF fusion comprises at least 5, 10, 15, 20, 30, 40, 50 or more amino acids from exons 1-9 of LSM14A (e.g., from the amino acid sequence of LSM14A as shown in SEQ ID NO:69 (e.g., from the amino acid sequence of LSM14A preceding the fusion junction with BRAF, and at least 5, 10, 15, 20, 30, 40, 50 or more amino acids from exons 9-18 of BRAF (e.g., from the amino acid sequence of BRAF as shown in SEQ ID NO:2). In another embodiment, the LSM14A-BRAF fusion comprises at least 6, 12, 15, 20, 25, 50, 75, 100) or more nucleotides from exons 1-9 of LSM14A (e.g., from the nucleotide sequence of LSM14A as shown in SEQ ID NO:68 (e.g., from the nucleotide sequence of LSM14A preceding the fusion junction with BRAF); and at least 6, 12, 15, 20, 25, 50, 75, 100 or more nucleotides from exons 9-18 of BRAF (e.g., from the nucleotide sequence of BRAF as shown in SEQ ID NO: 1).

### LSM14A-BRAF Nucleic Acid Molecules

[0657] In one aspect, the invention features a nucleic acid molecule (e.g., an isolated or purified) nucleic acid molecule that includes a fragment of a LSM14A gene and a fragment of a BRAF gene. In one embodiment, the nucleotide sequence encodes a LSM14A-BRAF fusion polypeptide that includes a tyrosine kinase domain or a functional fragment thereof. In another embodiment, the nucleotide sequence encodes a fragment of the BRAF polypeptide including the amino acid sequence of SEQ ID NO:2 or a fragment thereof, or a sequence substantially identical thereto. In other embodiments, the nucleic acid molecule includes a fragment of the LSM14A gene encoding the amino acid sequence of SEQ ID NO:69 or a fragment thereof, or a sequence substantially identical thereto. In yet other embodiments, the nucleic acid molecule includes a nucleotide sequence encoding the amino acid sequence shown in SEQ ID NO:69, or a fragment thereof, and the amino acid sequence shown in SEQ ID NO:2 or a fragment thereof, or a sequence substantially identical thereto.

[0658] In one embodiment, the nucleic acid molecule includes a fusion. e.g., an in-frame fusion, between an intron of LSM14A (e.g., intron 9, or a fragment thereof), and an intron of BRAF (e.g., intron 8, or a fragment thereof). The LSM14A-BRAF fusion can comprise a fusion of the nucleotide sequence of: chromosome 19 at one or more of a nucleotide (plus or minus 10, 20, 30, 50, 60, 70, 80, 100 nucleotides) and chromosome 7 at one or more of a nucleotide (plus or minus 10, 20, 30, 50, 60, 70, 80, 100 nucleotides), or a fragment thereof. In another embodiment, the LSM14A-BRAF fusion comprises a fusion of the nucleotide sequence of: chromosome 19 at one or more of a nucleotide (plus or minus 10, 20, 30, 50, 60, 70, 80, 100 nucleotides) and chromosome 7 at one or more of a nucleotide (plus or minus 10, 20, 30, 50, 60, 70, 80, 100 nucleotides), or a fragment thereof.

[0659] In another embodiment, the LSM14A-BRAF fusion comprises a nucleotide sequence (e.g., a fragment of a nucleotide sequence) shown in SEQ ID NO:68 and a nucleotide sequence (e.g., a fragment of a nucleotide sequence) shown in SEQ ID NO:1, or a fragment of the fusion. In one embodiment, the LSM14A-BRAF fusion comprises a nucleotide sequence substantially identical to the nucleotide sequence (e.g., a fragment of a nucleotide sequence) shown in SEQ ID NO:68 and the nucleotide sequence (e.g., a fragment of a nucleotide sequence) shown SEQ ID NO: 1, or a fragment of the fusion. In one embodiment, the LSM14A-BRAF fusion comprises a nucleotide sequence at least 70%, at least 75%, at least 80%, at least 85%, at least 90%, at least 95%, at least 99%, at least 99.5 or greater, identical to the nucleotide sequence (e.g., a fragment of a nucleotide sequence) shown in SEQ ID NO:68 and to the nucleotide sequence (e.g., a fragment of a nucleotide sequence) shown in SEQ ID NO:1. In one embodiment, the LSM14A-BRAF fusion comprises a nucleotide sequence containing at least 25, 50, 100, 150, 200, 500, 1000, 1500, 2000, 2500, 3000, or more nucleotides of the nucleotide sequence shown in SEQ ID NO:68 and a nucleotide sequence containing at least 25, 50, 100, 150, 200, 500, 1000, 1500, 2000, 2500, 3000, or more nucleotides of the nucleotide sequence shown in SEQ ID NO:1. In one embodiment, the LSM14A-BRAF fusion comprises a nucleotide sequence containing at least 25, 50, 100, 150, 200, 500, 1000, 1500, 2000, 2500, 3000, or more contiguous nucleotides of the nucleotide sequence shown in SEQ ID NO:68 and a nucleotide sequence containing at least 25, 50, 100, 150, 200, 500, 1000, 1500, 2000, 2500, 3000, or more nucleotides of the nucleotide sequence shown in SEQ ID NO:1.

[0660] In another embodiment, the nucleic acid molecule includes a fusion, e.g., an in-frame fusion, of at least 1, 2, 3, 4, 5, 6, 7, 8, 9 or more exons of LSM14A or a fragment thereof (e.g., one or more of exons 1-9 of LSM14A or a fragment thereof), and at least 1, 2, 3, 4, 5, 6, 7, 8, 9, 10 or more exons of BRAF or a fragment thereof (e.g., one or more of exons 9-18 of BRAF or a fragment thereof). In yet other embodiments, the nucleic acid molecule includes a fragment the nucleotide sequence shown in SEQ ID NO:68 and a fragment of the nucleotide sequence shown in SEQ ID NO: 1 or a fragment of the fusion, or a sequence substantially identical thereto.

[0661] In one embodiment, the nucleic acid molecule is complementary to at least a portion of a nucleotide sequence disclosed herein, e.g., is capable of hybridizing under a stringency condition described herein to SEQ ID NO:68 and/or SEQ ID NO: 1, or a fragment thereof. In yet another embodiment, the nucleic acid molecule hybridizes to a nucleotide sequence that is complementary to at least a portion of a nucleotide sequence disclosed herein, e.g., is capable of hybridizing under a stringency condition to a nucleotide sequence complementary to SEQ ID NO:68 and/or SEQ ID NO: 1, or a fragment thereof. The nucleotide sequence of a cDNA encoding an exemplary 5′ LSM14A-3′ BRAF fusion is shown in at least exon 9 (e.g., exons 1-9) of SEQ ID NO:68 and at least exon 9 (e.g., exons 9-18) of SEQ ID NO: 1, and the predicted amino acid sequence is shown in the corresponding encoded exons of SEQ ID NO:69 and the corresponding encoded exons of SEQ ID NO:2, respectively.

[0662] In an embodiment the LSM14A-BRAF nucleic acid molecule comprises sufficient LSM14A and sufficient BRAF sequence such that the encoded 5′ LSM14A-3′ BRAF fusion has kinase activity, e.g., has elevated activity. In certain embodiments, the 5′ LSM14A-3′ BRAF fusion comprises exons 1-9 from LSM14A and exons 9-18 from BRAF. In certain embodiments, the LSM14A-BRAF fusion comprises at least 1, 2, 3, 4, 5, 6, 7, 8, 9 or more exons from LSM14A and at least at least 1, 2, 3, 4, 5, 6, 7, 8, 9, 10 or more exons of BRAF. In certain embodiments, the LSM14A-BRAF fusion comprises a fusion of exon 9 from LSM14A and exon 9 from BRAF. In another embodiment, the LSM14A-BRAF fusion comprises 1, 2, 3, 4, 5, 6, 7, 8, 9 or more exons of LSM14A; and at least 1, 2, 3, 4, 5, 6, 7, 8, 9, 10 or more exons of BRAF.

[0663] In one embodiment, the nucleic acid molecule includes a nucleotide sequence that has an in-frame fusion of intron 9 of LSM14A (e.g., NM_{—}001114093) with intron 8 of BRAF (e.g., NM_{—}004333). In another embodiment, the nucleic acid molecule includes a nucleotide sequence that includes a breakpoint. For example, the nucleic acid molecule includes a nucleotide sequence that includes the fusion junction between the LSM14A gene and the BRAF gene, e.g., the breakpoint between intron 9 of LSM14A and intron 8 of BRAF. In other embodiments, the nucleic acid molecules includes a nucleotide sequence of one or more of nucleotide of chromosome 19 coupled to (e.g., directly or indirectly juxtaposed to) one or more of nucleotide of chromosome 7. In one embodiment, the nucleic acid molecule includes the nucleotide sequence of: chromosome 19 at one or more of a nucleotide plus or minus 10, 20, 30, 40 50, 60, 80, 100, 150 nucleotides and chromosome 7 at one or more of a nucleotide plus or minus 10, 20, 30, 40 50, 60, 80, 100, 150 nucleotides (corresponding to the breakpoint of a LSM14A-BRAF fusion), or a fragment thereof, or a sequence substantially identical thereto. In one embodiment, the nucleic acid molecule is complementary to at least a portion of a nucleotide sequence disclosed herein, e.g., is capable of hybridizing under a stringency condition described herein to SEQ ID NO:68 and/or SEQ ID NO: 1 or a fragment thereof. In yet other embodiment, the nucleic acid molecule hybridizes to a nucleotide sequence that is complementary to at least a portion of a nucleotide sequence disclosed herein, e.g., is capable of hybridizing under a stringency condition described herein to a nucleotide sequence complementary to SEQ ID NO:68 or SEQ ID NO:1 or a fragment thereof.

[0664] In another embodiment, the LSM14A-BRAF fusion nucleic acid comprises at least 6, 12, 15, 20, 25, 50, 75, 100 or more nucleotides from exon 9 of LSM4A (e.g., from the nucleotide sequence of LSM14A preceding the fusion junction with BRAF, e.g., of the LSM14A sequence shown in SEQ ID NO:68), and at least 6, 12, 15, 20, 25, 50, 75, 100 or more nucleotides from exon 9 of BRAF (e.g., from the nucleotide sequence of BRAF following the fusion junction with LSM14A, e.g., of the BRAF sequence shown in SEQ ID NO: 1).

[0665] In other embodiments, the nucleic acid molecule includes a nucleotide sequence encoding a LSM14A-BRAF fusion polypeptide that includes a fragment of a LSM14A gene and a fragment of a BRAF gene. In one embodiment, the nucleotide sequence encodes a LSM14A-BRAF fusion polypeptide that includes e.g., a tyrosine kinase domain or a functional fragment thereof. In yet other embodiments, the nucleic acid molecule includes a nucleotide sequence encoding the amino acid sequence (e.g., a fragment of the amino acid sequence) shown in SEQ ID NO:69 and a nucleotide sequence encoding the amino acid sequence (e.g., a fragment of the amino acid sequence) shown in SEQ ID NO:2, or a fragment of the fusion, or a sequence substantially identical thereto. In one embodiment, the encoded LSM14A-BRAF fusion polypeptide includes a tyrosine kinase domain or a functional fragment thereof.

[0666] In a related aspect, the invention features nucleic acid constructs that include the LSM14A-BRAF nucleic acid molecules described herein. In certain embodiments, the nucleic acid molecules are operatively linked to a native or a heterologous regulatory sequence. Also included are vectors and host cells that include the LSM14A-BRAF nucleic acid molecules described herein, e.g., vectors and host cells suitable for producing the nucleic acid molecules and polypeptides described herein.

[0667] In a related aspect, methods of producing the nucleic acid molecules and polypeptides described herein are also described.

[0668] In another aspect, the invention features nucleic acid molecules that reduce or inhibit the expression of a nucleic acid molecule that encodes a LSM14A-BRAF fusion described herein. Examples of such nucleic acid molecules include, for example, antisense molecules, ribozymes, RNAi, triple helix molecules that hybridize to a nucleic acid encoding LSM14A-BRAF, or a transcription regulatory region of LSM14A-BRAF, and blocks or reduces mRNA expression of LSM14A-BRAF.

### Nucleic Acid Detection and Capturing Reagents

[0669] The invention also features a nucleic acid molecule, e.g., nucleic acid fragment, suitable as probe, primer, bait or library member that includes, flanks, or hybridizes to the LSM14A-BRAF fusions described herein. Such nucleic acid molecules are useful for identifying, or are otherwise based on, the LSM14A-BRAF fusions described herein. In certain embodiments, the probe, primer or bait molecule is an oligonucleotide that allows capture, detection or isolation of a LSM14A-BRAF fusion nucleic acid molecule described herein. The oligonucleotide can comprise a nucleotide sequence substantially complementary to a fragment of the LSM14A-BRAF fusion nucleic acid molecules described herein. The sequence identity between the nucleic acid fragment. e.g., the oligonucleotide, and the target LSM14A-BRAF sequence need not be exact, so long as the sequences are sufficiently complementary to allow the capture, detection or isolation of the target sequence. In one embodiment, the nucleic acid fragment is a probe or primer that includes an oligonucleotide between about 5 and 25, e.g., between 10 and 20, or 10 and 15 nucleotides in length. In other embodiments, the nucleic acid fragment is a bait that includes an oligonucleotide between about 100 to 300 nucleotides, 130 and 230 nucleotides, or 150 and 200 nucleotides, in length.

[0670] In one embodiment, the nucleic acid fragment can be used to identify or capture, e.g., by hybridization, a LSM14A-BRAF fusion. For example, the nucleic acid fragment can be a probe, a primer, or a bait, for use in identifying or capturing, e.g., by hybridization, a LSM14A-BRAF fusion described herein. In one embodiment, the nucleic acid fragment can be useful for identifying or capturing a LSM14A-BRAF breakpoint, e.g., the nucleotide sequence of: chromosome 19 at nucleotide plus or minus 10, 20, 30, 40, 50, 60, 80, 100, 150 nucleotides and chromosome 7 at nucleotide plus or minus 10, 20, 30, 40 50, 60, 80, 100, 150 nucleotides.

[0671] In one embodiment, the nucleic acid fragment hybridizes to a nucleotide sequence within a chromosomal rearrangement that creates an in-frame fusion of intron 9 of LSM14A with intron 8 of BRAF. In one embodiment, the nucleic acid fragment hybridizes to a nucleotide sequence in the region In other embodiments, the nucleic acid molecules includes a nucleotide sequence in the region of a nucleotide sequence of chromosome 19 coupled to (e.g., juxtaposed to) nucleotides in the region of a nucleotide sequence of chromosome 17. In one embodiment, the nucleic acid fragment hybridizes to a nucleotide sequence that includes a breakpoint, e.g., the nucleotide sequence of: chromosome 19 at nucleotide plus or minus 10, 20, 30, 40 50, 60, 80, 100, 150 or more nucleotides and chromosome 7 at nucleotide plus or minus 10, 20, 30, 40 50, 60, 80, 100, 150 or more nucleotides. For example, the nucleic acid fragment can hybridize to a nucleotide sequence that includes the fusion junction between the LSM14A gene and the BRAF gene, e.g., a nucleotide sequence that includes a portion of a nucleotide sequence within intron 9 of a LSM14A gene and intron 8 of a BRAF gene.

[0672] In another embodiment, the nucleic acid fragment hybridizes to a nucleotide sequence that comprises at least 6, 12, 15, 20, 25, 50, 75, 100, 150 or more nucleotides from exon 9 of LSM14A (e.g., from the nucleotide sequence of LSM14A preceding the fusion junction with BRAF, e.g., of the LSM14A sequence shown in SEQ ID NO:68), and at least 6, 12, 15, 20, 25, 50, 75, 100, 150 or more nucleotides from exon 9 of BRAF (e.g., from the nucleotide sequence of BRAF following the fusion junction with LSM14A, e.g., of the BRAF sequence shown in SEQ ID NO: 1).

[0673] The probes or primers described herein can be used, for example, for FISH detection or PCR amplification. In one exemplary embodiment where detection is based on PCR, amplification of the LSM14A-BRAF fusion junction fusion junction can be performed using a primer or a primer pair, e.g., for amplifying a sequence flanking the fusion junctions described herein, e.g., the mutations or the junction of a chromosomal rearrangement described herein, e.g., LSM14A-BRAF.

[0674] In one embodiment, a pair of isolated oligonucleotide primers can amplify a region containing or adjacent to a position in the LSM14A-BRAF fusion. For example, forward primers can be designed to hybridize to a nucleotide sequence within LSM14A genomic or mRNA sequence (e.g., a nucleotide sequence within exon 9 of LSM14A of SEQ ID NO:68, and the reverse primers can be designed to hybridize to a nucleotide sequence of BRAF (e.g., a nucleotide sequence within exon 9 of BRAF, of SEQ ID NO:1.

[0675] In another embodiment, the nucleic acid fragments can be used to identify, e.g., by hybridization, a LSM14A-BRAF fusion. In one embodiment, the nucleic acid fragment hybridizes to a nucleotide sequence that includes a fusion junction between the LSM14A transcript and the BRAF transcript.

[0676] In other embodiments, the nucleic acid fragment includes a bait that comprises a nucleotide sequence that hybridizes to a LSM14A-BRAF fusion nucleic acid molecule described herein, and thereby allows the capture or isolation said nucleic acid molecule. In one embodiment, a bait is suitable for solution phase hybridization. In other embodiments, a bait includes a binding entity, e.g., an affinity tag, that allows capture and separation, e.g., by binding to a binding entity, of a hybrid formed by a bait and a nucleic acid hybridized to the bait.

[0677] In other embodiments, the nucleic acid fragment includes a library member comprising a LSM14A-BRAF nucleic acid molecule described herein. In one embodiment, the library member includes a rearrangement that results in a LSM14A-BRAF fusion described herein.

[0678] The nucleic acid fragment can be detectably labeled with, e.g., a radiolabel, a fluorescent label, a bioluminescent label, a chemiluminescent label, an enzyme label, a binding pair label, or can include an affinity tag; a tag, or identifier (e.g., an adaptor, barcode or other sequence identifier).

### LSM14A-BRAF Fusion Polypeptides

[0679] In another embodiment, the LSM14A-BRAF fusion comprises an amino acid sequence (e.g., a fragment of the amino acid sequence) shown in SEQ ID NO:69 and an amino acid sequence (e.g., a fragment of the amino acid sequence) shown in SEQ ID NO:2, or a fragment of the fusion. In one embodiment, the LSM14A-BRAF fusion comprises an amino acid sequence substantially identical to the amino acid sequence (e.g., a fragment of the amino acid sequence) shown in SEQ ID NO:69 and the amino acid sequence (e.g., a fragment of the amino acid sequence) shown in SEQ ID NO:2, or a fragment thereof. In one embodiment, the LSM14A-BRAF fusion comprises an amino acid sequence at least 70%, at least 75%, at least 80%, at least 85%, at least 90%, at least 95%, at least 99%, at least 99.5 or greater, identical to the amino acid sequence (e.g., a fragment of the amino acid sequence) shown in 142 SEQ ID NO:69 and the amino acid sequence (e.g., a fragment of the amino acid sequence) shown in SEQ ID NO:2. In one embodiment, the LSM14A-BRAF fusion comprises a sequence containing at least 10, 20, 50, 100, 500, 600, 700, 800, 900, 1000, or more amino acids of the amino acid sequence shown in SEQ ID NO:69 and SEQ ID NO:2. In one embodiment, the LSM14A-BRAF fusion comprises an amino acid sequence containing at least 5, 10, 20, 50, 100, 500, 600, 700, 800, 900, 1000, or more contiguous amino acids of the amino acid sequence shown in SEQ ID NO:69 and at least 5, 10, 20, 50, 100, 500, 600, 700, 800, 900, 1000, or more contiguous amino acids of the amino acid sequence shown in SEQ ID NO:2. In one embodiment, the 5′ LSM14A-3′ BRAF fusion polypeptide includes a receptor tyrosine kinase domain or a functional fragment thereof. In an embodiment, the 5′LSM14A-3′BRAF fusion polypeptide comprises sufficient BRAF and sufficient LSM14A sequence such that it has kinase activity, e.g., has elevated activity. In any event, the fusion causes activation in the cells harboring it of oncogenic signaling pathways.

[0680] In another aspect, the invention features a LSM14A-BRAF fusion polypeptide (e.g., a purified LSM14A-BRAF fusion polypeptide), a biologically active or antigenic fragment thereof, as well as reagents (e.g., antibody molecules that bind to a LSM14A-BRAF fusion polypeptide), methods for modulating a LSM14A-BRAF polypeptide activity and detection of a LSM14A-BRAF polypeptide.

[0681] In one embodiment, the LSM14A-BRAF fusion polypeptide has at least one biological activity. In one embodiment, at least one biological activity of the LSM14A-BRAF fusion polypeptide is reduced or inhibited by an anti-cancer drug, e.g., a LSM14A inhibitor, a BRAF inhibitor. In one embodiment, at least one biological activity of the LSM14A-BRAF fusion polypeptide is reduced or inhibited by a BRAF inhibitor. In one embodiment, at least one biological activity of the LSM14A-BRAF fusion polypeptide is reduced or inhibited by a LSM14A inhibitor. In one embodiment, at least one biological activity of the LSM14A-BRAF fusion polypeptide is reduced or inhibited by a BRAF inhibitor, e.g., vemurafenib (also known as RG7204; or PLX4032; or Zelboraf); GDC-0879; PLX-4702; AZ628; dabrafenib (GSK2118346A); or Sorafenib Tosylate.

[0682] In yet other embodiments, the LSM14A-BRAF fusion polypeptide is encoded by a nucleic acid molecule described herein. In one embodiment, the LSM14A-BRAF fusion polypeptide is encoded by an in-frame fusion of intron 9 of LSM14A with intron 8 of BRAF (e.g., a sequence on chromosome 19 and a sequence on chromosome 7). In another embodiment, the LSM14A-BRAF fusion polypeptide includes an amino acid sequence encoded by a nucleotide sequence comprising a fusion junction between the LSM14A transcript and the BRAF transcript.

[0683] In certain embodiments, the LSM14A-BRAF fusion polypeptide comprises one or more of encoded exons 1-9 from LSM14A and one or more of encoded exons 9-18 of BRAF. In certain embodiments, the LSM14A-BRAF fusion polypeptide comprises at least 1, 2, 3, 4, 5, 6, 7, 8, 9 or more encoded exons of LSM14A and at least at least 1, 2, 3, 4, 5, 6, 7, 8, 9, 10 or more encoded exons of BRAF. In certain embodiments, the LSM14A-BRAF fusion polypeptide comprises a fusion of encoded exon 9 from LSM14A and encoded exon 9 from BRAF (or a fragment thereof). In other embodiments, the fusion comprises at least 1, 2, 3, 4, 5, 6, 7, 8, 9 or more encoded exons of LSM14A; and at least 1, 2, 3, 4, 5, 6, 7, 8, 9, 10 or more encoded exons of BRAF. In certain embodiments, the LSM14A-BRAF fusion polypeptide comprises encoded exons 1-9 from LSM14A and exons 9-18 of BRAF. In certain embodiments, the 5′ LSM14A-3′ BRAF fusion polypeptide comprises a fusion junction of the sequence of exon 9 from LSM14A and the sequence of exon 9 from BRAF.

[0684] In certain embodiments, the LSM14A-BRAF fusion comprises the amino acid sequence corresponding to exon 9 or a fragment thereof from LSM14A, and the amino acid sequence corresponding to exon 9 or a fragment thereof from BRAF (e.g., as shown in SEQ ID NO:69 and SEQ ID NO:2). In one embodiment, the LSM14A-BRAF fusion comprises at least 5, 10, 15, 20 or more amino acids from exon 9 of LSM14A (e.g., from the amino acid sequence of LSM14A preceding the fusion junction with BRAF, e.g., of the LSM14A sequence shown in SEQ ID NO:69), and at least 5, 10, 15, 20 or more amino acids from exon 9 of BRAF (e.g., from the amino acid sequence of BRAF following the fusion junction with LSM14A, e.g., of the BRAF sequence shown in SEQ ID NO:2).

[0685] In one embodiment, the LSM14A-BRAF fusion includes the full sequence or a fragment of the nucleotide sequence shown in SEQ ID NO:78, or a nucleotide sequence substantially identical thereto. In another embodiment, the LSM14A-BRAF fusion polypeptide includes the full sequence or a fragment of the amino acid sequence shown in SEQ ID NO:79, or an amino acid sequence substantially identical thereto.

[0686] In one embodiment, the LSM14A-BRAF fusion polypeptide includes a tyrosine kinase domain or a functional fragment thereof. In a related aspect, the invention features LSM14A-BRAF fusion polypeptide or fragments operatively linked to heterologous polypeptides to form fusion proteins.

[0687] In another embodiment, the LSM14A-BRAF fusion polypeptide or fragment is a peptide, e.g., an immunogenic peptide or protein containing a fusion junction described herein. Such immunogenic peptides or proteins can be used to raise antibodies specific to the fusion protein. In other embodiments, such immunogenic peptides or proteins can be used for vaccine preparation. The vaccine preparation can include other components, e.g., an adjuvant.

[0688] In another aspect, the invention features antibody molecules that bind to a LSM14A-BRAF fusion polypeptide or fragment described herein. In embodiments, the antibody can distinguish wild type BRAF (or LSM14A) from LSM14A-BRAF.

### Detection Reagents and Detection of Mutations

[0689] In another aspect, the invention features a detection reagent, e.g., a purified or an isolated preparation thereof. Detection reagents can distinguish a nucleic acid, or protein sequence, having a breakpoint, e.g., a LSM14A-BRAF breakpoint; from a reference sequence. In one embodiment, the detection reagent detects (e.g., specifically detects) a LSM14A-BRAF fusion nucleic acid or a polypeptide, e.g., distinguishes a wild type BRAF or another BRAF fusion (or LSM14A) from a LSM14A-BRAF nucleic acid (e.g., as described herein in SEQ ID NO:68 and SEQ ID NO:1); or a LSM14A-BRAF polypeptide (e.g., as described herein in SEQ ID NO:69 and SEQ ID NO:2).

[0690] Detection reagents, e.g., nucleic acid-based detection reagents, can be used to identify mutations in a target nucleic acid, e.g., DNA, e.g., genomic DNA or cDNA, or RNA, e.g., in a sample, e.g., a sample of nucleic acid derived from a neoplastic or tumor cell, e.g., a melanocytic neoplasm, melanoma or metastatic cell. Detection reagents, e.g., antibody-based detection reagents, can be used to identify mutations in a target protein. e.g., in a sample, e.g., a sample of protein derived from, or produced by, a neoplastic or tumor cell, e.g., a melanocytic neoplasm, melanoma or metastatic cell.

### Method of Treatment

[0691] In a related aspect, a method of inhibiting, reducing, or treating a hyperproliferative disorder, e.g., a neoplasm (including benign, pre-malignant or malignant (e.g., a cancer), in a subject is provided. The method includes administering to the subject a preselected therapeutic agent, e.g., an anti-cancer agent (e.g., a kinase inhibitor), as a single agent, or in combination, in an amount sufficient to reduce, inhibit or treat the activity or expression of LSM14A-BRAF (e.g., a LSM14A-BRAF fusion described herein), thereby inhibiting, reducing, or treating the hyperproliferative disorder in the subject.

[0692] In one embodiment, the subject treated has a LSM14A-BRAF fusion; e.g., the subject has a tumor or cancer harboring a LSM14A-BRAF fusion. In other embodiments, the subject has been previously identified as having a LSM14A-BRAF fusion. In yet other embodiments, the subject has been previously identified as being likely or unlikely to respond to treatment with a protein kinase inhibitor. e.g., a subject that has previously participated in a clinical trial. In other embodiments, the subject has been previously identified as being likely or unlikely to respond to treatment with a protein kinase inhibitor, based on the presence of the LSM14A-BRAF fusion. In one embodiment, the subject is a mammal, e.g., a human. In one embodiment, the subject has, or at risk of having a cancer at any stage of disease. In other embodiments, the subject is a patient, e.g., a cancer patient.

[0693] In certain embodiments, the neoplasm or neoplastic cell is a benign, pre-malignant, malignant (cancer) or metastasis. In certain embodiments, the cancer is a solid tumor, a soft tissue tumor, or a metastatic lesion.

[0694] In one embodiment, the neoplasm or neoplastic cell is a benign, pre-malignant, malignant (cancer) or metastasis. In certain embodiments, the cancer is a solid tumor, a soft tissue tumor, or a metastatic lesion. In one embodiment, the cancer is a carcinoma. In one embodiment the cancer is a papillary thyroid carcinoma. In one embodiment the cancer is a pilocytic astrocytomas. In one embodiment, the cancer is a melanocytic tumor. In one embodiment, the cancer is an adenocarcinoma. In an embodiment, the cancer is a lung adenocarcinoma. In one embodiment, the cancer is chosen from a lung cancer, a pancreatic cancer, melanoma, a colorectal cancer, an esophageal-gastric cancer, a thyroid cancer, or an adenocarcinoma. In one embodiment, the cancer is a lung adenocarcinoma. In other embodiment, the lung cancer is chosen from one or more of the following: non-small cell lung cancer (NSCLC), small cell lung cancer (SCLC), squamous cell carcinoma (SCC), adenocarcinoma of the lung, bronchogenic carcinoma, or a combination thereof. In one embodiment, the lung cancer is NSCLC or SCC.

[0695] In one embodiment, the anti-cancer agent is a BRAF inhibitor. In one embodiment, the anti-cancer agent is a LSM14A inhibitor. In one embodiment, the anti-cancer agent is a kinase inhibitor. In one embodiment, the anti-cancer agent is a BRAF inhibitor, e.g., vemurafenib (also known as RG7204; or PLX4032; or Zelboraf); GDC-0879; PLX-4702; AZ628; dabrafenib (GSK2118346A); or Sorafenib Tosylate.

### LMNA-NTRK1 Fusions

[0696] In one embodiment, a fusion includes an in-frame fusion of an exon of Lamin A/C (LMNA), e.g., one more exons of LMNA (e.g., one or more of exons 1-2 LMNA) or a fragment thereof, and an exon of neurotrophic tyrosine kinase receptor type 1 (NTRK1), e.g., one or more exons of NTRK1 (e.g., one or more of exons 9-17 of NTRK1) or a fragment thereof. For example, the LMNA-NTRK1 fusion can include an in-frame fusion within an intron of LMNA (e.g., intron 2) or a fragment thereof, with an intron of NTRK1 (e.g., intron 8) or a fragment thereof. In one embodiment, the fusion of the LMNA-NTRK1 fusion comprises the nucleotide sequence of: chromosome 1 at one or more of a nucleotide (plus or minus 10, 20, 30, 50, 60, 70, 80, 100 or more nucleotides) and chromosome 1 at one or more of a nucleotide (plus or minus 10, 20, 30, 50, 60, 70, 80, 100 or more nucleotides). In one embodiment, the LMNA-NTRK1 fusion is a translocation, e.g., a translocation of a portion of chromosome 1 and a portion of chromosome 1.

[0697] In certain embodiments, the LMNA-NTRK1 fusion is in a 5′-LMNA to 3′-NTRK1 configuration (also referred to herein as “5′-LMNA-NTRK1-3′).” The term “fusion” or “fusion molecule” can refer to a polypeptide or a nucleic acid fusion, depending on the context. It may include a full-length sequence of a fusion or a fragment thereof, e.g., a fusion junction (e.g., a fragment including a portion of LMNA and a portion of NTRK1, e.g., a portion of the LMNA-NTRK1 fusion described herein). In one embodiment, the LMNA-NTRK1 fusion polypeptide includes a fragment of the amino acid sequence shown in SEQ ID NO:71 and a fragment of the amino acid sequence shown in SEQ ID NO:4, or an amino acid sequence substantially identical thereto. In another embodiment, the LMNA-NTRK1 fusion nucleic acid includes a fragment of the nucleotide sequence shown in SEQ ID NO:70 and a fragment of the nucleotide sequence shown in SEQ ID NO:3, or a nucleotide sequence substantially identical thereto. In one embodiment, the LMNA-NTRK1 fusion polypeptide comprises sufficient LMNA and sufficient NTRK1 sequence such that the 5′ LMNA-3′ NTRK1 fusion has kinase activity, e.g., has elevated activity, e.g., tyrosine kinase activity. In any event, the fusion causes activation in the cells harboring it of oncogenic signaling pathways.

[0698] In certain embodiments, the LMNA-NTRK1 fusion comprises one or more (or all of) exons 1-2 from LMNA and one or more (or all of) exons 9-17 of NTRK1 (e.g., one or more of the exons shown in SEQ ID NO:70 and SEQ ID NO:3). In another embodiment, the LMNA-NTRK fusion comprises one or more (or all of) exons 1-2 of LMNA and one or more (or all of) exons 9-17 of NTRK1. In certain embodiments, the LMNA-NTRK1 fusion comprises at least 1, 2 or more exons (or encoded exons) from LMNA and at least 1, 2, 3, 4, 5, 6, 7, 8, 9 or more exons (or encoded exons) from NTRK1 (e.g., from the LMNA and NTRK1 sequences shown in SEQ ID NO:70 and SEQ ID NO:71 and SEQ ID NO:3 and SEQ ID NO:4.

[0699] In certain embodiments, the LMNA-NTRK1 fusion comprises exons 1-2 or a fragment thereof from LMNA, and exons 9-17 or a fragment thereof from NTRK1 (e.g., as shown in SEQ ID NO:70 and SEQ ID NO:3). In one embodiment, the LMNA-NTRK1 fusion comprises at least 5, 10, 15, 20, 30, 40, 50 or more amino acids from exons 1-2 of LMNA (e.g., from the amino acid sequence of LMNA as shown in SEQ ID NO:71 (e.g., from the amino acid sequence of LMNA preceding the fusion junction with NTRK1, and at least 5, 10, 15, 20, 30, 40, 50 or more amino acids from exons 9-17 of NTRK1 (e.g., from the amino acid sequence of NTRK1 as shown SEQ ID NO:4). In another embodiment, the LMNA-NTRK1 fusion comprises at least 6, 12, 15, 20, 25, 50, 75, 100 or more nucleotides from exons 1-2 of LMNA (e.g., from the nucleotide sequence of LMNA as shown in SEQ ID NO:70 (e.g., from the nucleotide sequence of LMNA preceding the fusion junction with NTRK1); and at least 6, 12, 15, 20, 25, 50, 75, 100 or more nucleotides from exons 9-17 of NTRK1 (e.g., from the nucleotide sequence of NTRK1 as shown in SEQ ID NO:3).

### LMNA-NTRK1 Nucleic Acid Molecules

[0700] In one aspect, the invention features a nucleic acid molecule (e.g., an isolated or purified) nucleic acid molecule that includes a fragment of a LMNA gene and a fragment of a NTRK1 gene. In one embodiment, the nucleotide sequence encodes a LMNA-NTRK1 fusion polypeptide that includes a tyrosine kinase domain or a functional fragment thereof. In another embodiment, the nucleotide sequence encodes a fragment of the NTRK1 polypeptide including the amino acid sequence of SEQ ID NO:4 or a fragment thereof, or a sequence substantially identical thereto. In other embodiments, the nucleic acid molecule includes a fragment of the LMNA gene encoding the amino acid sequence of SEQ ID NO:71 or a fragment thereof, or a sequence substantially identical thereto. In yet other embodiments, the nucleic acid molecule includes a nucleotide sequence encoding the amino acid sequence shown in SEQ ID NO:71, or a fragment thereof, and the amino acid sequence shown in SEQ ID NO:4 or a fragment thereof, or a sequence substantially identical thereto.

[0701] In one embodiment, the nucleic acid molecule includes a fusion, e.g., an in-frame fusion, between an intron of LMNA (e.g., intron 2 or a fragment thereof), and an intron of NTRK1 (e.g., intron 8, or a fragment thereof). The LMNA-NTRK1 fusion can comprise a fusion of the nucleotide sequence of: chromosome 1 at one or more of a nucleotide (plus or minus 10, 20, 30, 50, 60, 70, 80, 100 nucleotides) and chromosome 1 at one or more of a nucleotide (plus or minus 10, 20, 30, 50, 60, 70, 80, 100 nucleotides), or a fragment thereof. In one embodiment, the LMNA-NTRK1 fusion comprises a fusion of the nucleotide sequence of: chromosome 1 at one or more of a nucleotide (plus or minus 10, 20, 30, 50, 60, 70, 80, 100 nucleotides) and chromosome 1 at one or more of a nucleotide (plus or minus 10, 20, 30, 50, 60, 70, 80, 100 nucleotides), or a fragment thereof.

[0702] In another embodiment, the LMNA-NTRK1 fusion comprises a nucleotide sequence (e.g., a fragment of a nucleotide sequence) shown in SEQ ID NO:70 and a nucleotide sequence (e.g., a fragment of a nucleotide sequence) shown in SEQ ID NO:3, or a fragment of the fusion. In one embodiment, the LMNA-NTRK1 fusion comprises a nucleotide sequence substantially identical to the nucleotide sequence (e.g., a fragment of a nucleotide sequence) shown in SEQ ID NO:70 and the nucleotide sequence (e.g., a fragment of a nucleotide sequence) shown SEQ ID NO:3, or a fragment of the fusion. In one embodiment, the LMNA-NTRK1 fusion comprises a nucleotide sequence at least 70%, at least 75%, at least 80%, at least 85%, at least 90%, at least 95%, at least 99%, at least 99.5 or greater, identical to the nucleotide sequence (e.g., a fragment of a nucleotide sequence) shown in SEQ ID NO:70 and to the nucleotide sequence (e.g., a fragment of a nucleotide sequence) shown in SEQ ID NO:3. In one embodiment, the LMNA-NTRK1 fusion comprises a nucleotide sequence containing at least 25, 50, 100, 150, 200, 500, 1000, 1500, 2000, 2500, 3000, or more nucleotides of the nucleotide sequence shown in SEQ ID NO:70 and a nucleotide sequence containing at least 25, 50, 100, 150, 200, 500, 1000, 1500, 2000, 2500, 3000, or more nucleotides of the nucleotide sequence shown in SEQ ID NO:3. In one embodiment, the LMNA-NTRK1 fusion comprises a nucleotide sequence containing at least 25, 50, 100, 150, 200, 500, 1000, 1500, 2000, 2500, 3000, or more contiguous nucleotides of the nucleotide sequence shown in 155 SEQ ID NO:70 and a nucleotide sequence containing at least 25, 50, 100, 150, 200, 500, 1000, 1500, 2000, 2500, 3000, or more nucleotides of the nucleotide sequence shown in SEQ ID NO:3.

[0703] In another embodiment, the nucleic acid molecule includes a fusion, e.g., an in-frame fusion, of at least 1, 2 or more exons of LMNA or a fragment thereof (e.g., one or more of exons 1-2 of LMNA or a fragment thereof), and at least 1, 2, 3, 4, 5, 6, 7, 8, 9 or more exons of NTRK1 or a fragment thereof (e.g., one or more of exons 9-17 of NTRK1 or a fragment thereof). In yet other embodiments, the nucleic acid molecule includes a fragment the nucleotide sequence shown in SEQ ID NO:70 and a fragment of the nucleotide sequence shown in SEQ ID NO:3 or a fragment of the fusion, or a sequence substantially identical thereto.

[0704] In one embodiment, the nucleic acid molecule is complementary to at least a portion of a nucleotide sequence disclosed herein, e.g., is capable of hybridizing under a stringency condition described herein to SEQ ID NO:70 and/or SEQ ID NO:3, or a fragment thereof. In yet another embodiment, the nucleic acid molecule hybridizes to a nucleotide sequence that is complementary to at least a portion of a nucleotide sequence disclosed herein, e.g., is capable of hybridizing under a stringency condition to a nucleotide sequence complementary to SEQ ID NO:70 and/or SEQ ID NO:3, or a fragment thereof. The nucleotide sequence of a cDNA encoding an exemplary 5′ LMNA-3′ NTRK1 fusion is shown in at least exon 2 (e.g., exons 1-2) of SEQ ID NO:70 and at least exon 9 (e.g., exons 9-17) of SEQ ID NO:3, and the predicted amino acid sequence is shown in the corresponding encoded exons of SEQ ID NO:71 and the corresponding encoded exons of SEQ ID NO:4, respectively.

[0705] In an embodiment the LMNA-NTRK1 nucleic acid molecule comprises sufficient LMNA and sufficient NTRK1 sequence such that the encoded 5′ LMNA-3′ NTRK1 fusion has kinase activity, e.g., has elevated activity. In certain embodiments, the 5′ LMNA-3′ NTRK1 fusion comprises exons 1-2 from LMNA and exons 9-17 from NTRK1. In certain embodiments, the LMNA-NTRK fusion comprises at least 1, 2 or more exons from LMNA and at least at least 1, 2, 3, 4, 5, 6, 7, 8, 9 or more exons of NTRK1. In certain embodiments, the LMNA-NTRK1 fusion comprises a fusion of exon 2 from LMNA and exon 9 from NTRK1. In another embodiment, the LMNA-NTRK1 fusion comprises 1, 2 or more exons of LMNA; and at least 1, 2, 3, 4, 5, 6, 7, 8, 9 or more exons of NTRK1.

[0706] In one embodiment, the nucleic acid molecule includes a nucleotide sequence that has an in-frame fusion of intron 2 of LMNA (e.g., NM_{—}001126113) with intron 8 of NTRK1 (e.g., NM_{—}002529). In another embodiment, the nucleic acid molecule includes a nucleotide sequence that includes a breakpoint. For example, the nucleic acid molecule includes a nucleotide sequence that includes the fusion junction between the LMNA gene and the NTRK1 gene, e.g., the breakpoint between intron 2 or intron 9 or intron 11 or intron 12 of LMNA and intron 2 of NTRK1. In other embodiments, the nucleic acid molecules includes a nucleotide sequence of one or more of nucleotide of chromosome 1 coupled to (e.g., directly or indirectly juxtaposed to) one or more of nucleotide of chromosome 1. In one embodiment, the nucleic acid molecule includes the nucleotide sequence of: chromosome 1 at one or more of a nucleotide plus or minus 10, 20, 30, 40 50, 60, 80, 100, 150 nucleotides and chromosome 1 at one or more of a nucleotide plus or minus 10, 20, 30, 40 50, 60, 80, 100, 150 nucleotides (corresponding to the breakpoint of a LMNA-NTRK fusion), or a fragment thereof, or a sequence substantially identical thereto. In one embodiment, the nucleic acid molecule is complementary to at least a portion of a nucleotide sequence disclosed herein, e.g., is capable of hybridizing under a stringency condition described herein to SEQ ID NO:70 and/or SEQ ID NO:3 or a fragment thereof. In yet other embodiment, the nucleic acid molecule hybridizes to a nucleotide sequence that is complementary to at least a portion of a nucleotide sequence disclosed herein, e.g., is capable of hybridizing under a stringency condition described herein to a nucleotide sequence complementary to SEQ ID NO:70 or SEQ ID NO:3 or a fragment thereof.

[0707] In another embodiment, the LMNA-NTRK1 fusion nucleic acid comprises at least 6, 12, 15, 20, 25, 50, 75, 100 or more nucleotides from exon 2 or exon 9 or exon 11 or exon 12 of LMNA (e.g., from the nucleotide sequence of LMNA preceding the fusion junction with NTRK1, e.g., of the LMNA sequence shown in SEQ ID NO:70), and at least 6, 12, 15, 20, 25, 50, 75, 100 or more nucleotides from exon 9 of NTRK1 (e.g., from the nucleotide sequence of NTRK1 following the fusion junction with LMNA, e.g., of the NTRK1 sequence shown in SEQ ID NO:3).

[0708] In other embodiments, the nucleic acid molecule includes a nucleotide sequence encoding a LMNA-NTRK1 fusion polypeptide that includes a fragment of a LMNA gene and a fragment of a NTRK1 gene. In one embodiment, the nucleotide sequence encodes a LMNA-NTRK1 fusion polypeptide that includes e.g., a tyrosine kinase domain or a functional fragment thereof. In yet other embodiments, the nucleic acid molecule includes a nucleotide sequence encoding the amino acid sequence (e.g., a fragment of the amino acid sequence) shown in SEQ ID NO:71 and a nucleotide sequence encoding the amino acid sequence (e.g., a fragment of the amino acid sequence) shown in SEQ ID NO:4, or a fragment of the fusion, or a sequence substantially identical thereto. In one embodiment, the encoded LMNA-NTRK11 fusion polypeptide includes a tyrosine kinase domain or a functional fragment thereof.

[0709] In a related aspect, the invention features nucleic acid constructs that include the LMNA-NTRK1 nucleic acid molecules described herein. In certain embodiments, the nucleic acid molecules are operatively linked to a native or a heterologous regulatory sequence. Also included are vectors and host cells that include the LMNA-NTRK1 nucleic acid molecules described herein, e.g., vectors and host cells suitable for producing the nucleic acid molecules and polypeptides described herein.

[0710] In a related aspect, methods of producing the nucleic acid molecules and polypeptides described herein are also described.

[0711] In another aspect, the invention features nucleic acid molecules that reduce or inhibit the expression of a nucleic acid molecule that encodes a LMNA-NTRK1 fusion described herein. Examples of such nucleic acid molecules include, for example, antisense molecules, ribozymes, RNAi, triple helix molecules that hybridize to a nucleic acid encoding LMNA-NTRK1, or a transcription regulatory region of LMNA-NTRK1, and blocks or reduces mRNA expression of LMNA-NTRK1.

### Nucleic Acid Detection and Capturing Reagents

[0712] The invention also features a nucleic acid molecule, e.g., nucleic acid fragment, suitable as probe, primer, bait or library member that includes, flanks, or hybridizes to the LMNA-NTRK1 fusions described herein. Such nucleic acid molecules are useful for identifying, or are otherwise based on, the LMNA-NTRK1 fusions described herein. In certain embodiments, the probe, primer or bait molecule is an oligonucleotide that allows capture, detection or isolation of a LMNA-NTRK1 fusion nucleic acid molecule described herein. The oligonucleotide can comprise a nucleotide sequence substantially complementary to a fragment of the LMNA-NTRK1 fusion nucleic acid molecules described herein. The sequence identity between the nucleic acid fragment, e.g., the oligonucleotide, and the target LMNA-NTRK1 sequence need not be exact, so long as the sequences are sufficiently complementary to allow the capture, detection or isolation of the target sequence. In one embodiment, the nucleic acid fragment is a probe or primer that includes an oligonucleotide between about 5 and 25, e.g., between 10 and 20, or 10 and 15 nucleotides in length. In other embodiments, the nucleic acid fragment is a bait that includes an oligonucleotide between about 100 to 300 nucleotides, 130 and 230 nucleotides, or 150 and 200 nucleotides, in length.

[0713] In one embodiment, the nucleic acid fragment can be used to identify or capture, e.g., by hybridization, a LMNA-NTRK1 fusion. For example, the nucleic acid fragment can be a probe, a primer, or a bait, for use in identifying or capturing, e.g., by hybridization, a LMNA-NTRK1 fusion described herein. In one embodiment, the nucleic acid fragment can be useful for identifying or capturing a LMNA-NTRK1 breakpoint, e.g., the nucleotide sequence of: chromosome 1 at nucleotide plus or minus 10, 20, 30, 40, 50, 60, 80, 100, 150 nucleotides and chromosome 1 at nucleotide plus or minus 10, 20, 30, 40 50, 60, 80, 100, 150 nucleotides.

[0714] In one embodiment, the nucleic acid fragment hybridizes to a nucleotide sequence within a chromosomal rearrangement that creates an in-frame fusion of intron 2 or intron 9 or intron 11 or intron 12 of LMNA with intron 8 of NTRK1. In one embodiment, the nucleic acid fragment hybridizes to a nucleotide sequence in the region In other embodiments, the nucleic acid molecules includes a nucleotide sequence in the region of a nucleotide sequence of chromosome 1 coupled to (e.g., juxtaposed to) nucleotides in the region of a nucleotide sequence Y of chromosome 1. In one embodiment, the nucleic acid fragment hybridizes to a nucleotide sequence that includes a breakpoint. e.g., the nucleotide sequence of: chromosome 1 at nucleotide plus or minus 10, 20, 30, 40, 50, 60, 80, 100, 150 or more nucleotides and chromosome 1 at nucleotide plus or minus 10, 20, 30, 40 50, 60, 80, 100, 150 or more nucleotides. For example, the nucleic acid fragment can hybridize to a nucleotide sequence that includes the fusion junction between the LMNA gene and the NTRK1 gene, e.g., a nucleotide sequence that includes a portion of a nucleotide sequence within intron 2 or intron 9 or intron 11 or intron 12 of a LMNA gene and intron 2 of a NTRK1 gene.

[0715] In another embodiment, the nucleic acid fragment hybridizes to a nucleotide sequence that comprises at least 6, 12, 15, 20, 25, 50, 75, 100, 150 or more nucleotides from exon 2 or exon 9 or exon 11 or exon 12 of LMNA (e.g., from the nucleotide sequence of LMNA preceding the fusion junction with NTRK1, e.g., of the LMNA sequence shown in SEQ ID NO:70), and at least 6, 12, 15, 20, 25, 50, 75, 100, 150 or more nucleotides from exon 9 of NTRK1 (e.g., from the nucleotide sequence of NTRK1 following the fusion junction with LMNA, e.g., of the NTRK1 sequence shown in SEQ ID NO:3).

[0716] The probes or primers described herein can be used, for example, for FISH detection or PCR amplification. In one exemplary embodiment where detection is based on PCR, amplification of the LMNA-NTRK1 fusion junction fusion junction can be performed using a primer or a primer pair, e.g., for amplifying a sequence flanking the fusion junctions described herein, e.g., the mutations or the junction of a chromosomal rearrangement described herein, e.g., LMNA-NTRK1.

[0717] In one embodiment, a pair of isolated oligonucleotide primers can amplify a region containing or adjacent to a position in the LMNA-NTRK1 fusion. For example, forward primers can be designed to hybridize to a nucleotide sequence within LMNA genomic or mRNA sequence (e.g., a nucleotide sequence within exon 2 of LMNA of SEQ ID NO:70, and the reverse primers can be designed to hybridize to a nucleotide sequence of NTRK1 (e.g., a nucleotide sequence within exon 9 of NTRK1, of SEQ ID NO:3.

[0718] In another embodiment, the nucleic acid fragments can be used to identify, e.g., by hybridization, a LMNA-NTRK1 fusion. In one embodiment, the nucleic acid fragment hybridizes to a nucleotide sequence that includes a fusion junction between the LMNA transcript and the NTRK1 transcript.

[0719] In other embodiments, the nucleic acid fragment includes a bait that comprises a nucleotide sequence that hybridizes to a LMNA-NTRK1 fusion nucleic acid molecule described herein, and thereby allows the capture or isolation said nucleic acid molecule. In one embodiment, a bait is suitable for solution phase hybridization. In other embodiments, a bait includes a binding entity, e.g., an affinity tag, that allows capture and separation, e.g., by binding to a binding entity, of a hybrid formed by a bait and a nucleic acid hybridized to the bait.

[0720] In other embodiments, the nucleic acid fragment includes a library member comprising a LMNA-NTRK1 nucleic acid molecule described herein. In one embodiment, the library member includes a rearrangement that results in a LMNA-NTRK fusion described herein.

[0721] The nucleic acid fragment can be detectably labeled with, e.g., a radiolabel, a fluorescent label, a bioluminescent label, a chemiluminescent label, an enzyme label, a binding pair label, or can include an affinity tag; a tag, or identifier (e.g., an adaptor, barcode or other sequence identifier).

### LMNA-NTRK1 Fusion Polypeptides

[0722] In another embodiment, the LMNA-NTRK1 fusion comprises an amino acid sequence (e.g., a fragment of the amino acid sequence) shown in SEQ ID NO:71 and an amino acid sequence (e.g., a fragment of the amino acid sequence) shown in SEQ ID NO:4, or a fragment of the fusion. In one embodiment, the LMNA-NTRK1 fusion comprises an amino acid sequence substantially identical to the amino acid sequence (e.g., a fragment of the amino acid sequence) shown in SEQ ID NO:71 and the amino acid sequence (e.g., a fragment of the amino acid sequence) shown in SEQ ID NO:4, or a fragment thereof. In one embodiment, the LMNA-NTRK1 fusion comprises an amino acid sequence at least 70%, at least 75%, at least 80%, at least 85%, at least 90%, at least 95%, at least 99%, or at least 99.5, identical to the amino acid sequence (e.g., a fragment of the amino acid sequence) shown in SEQ ID NO:71 and the amino acid sequence (e.g., a fragment of the amino acid sequence) shown in SEQ ID NO:4. In one embodiment, the LMNA-NTRK1 fusion comprises a sequence containing at least 10, 20, 50, 100, 500, 600, 700, 800, 900, 1000, or more amino acids of the amino acid sequence shown in SEQ ID NO:71 and SEQ ID NO:4. In one embodiment, the LMNA-NTRK1 fusion comprises an amino acid sequence containing at least 5, 10, 20, 50, 100, 500, 600, 700, 800, 900, 1000, or more contiguous amino acids of the amino acid sequence shown in 156 SEQ ID NO:71 and at least 5, 10, 20, 50, 100, 500, 600, 700, 800, 900, 1000, or more contiguous amino acids of the amino acid sequence shown in SEQ ID NO:4. In one embodiment, the 5′ LMNA-3′ NTRK1 fusion polypeptide includes a receptor tyrosine kinase domain or a functional fragment thereof. In an embodiment, the 5′LMNA-3′NTRK1 fusion polypeptide comprises sufficient NTRK1 and sufficient LMNA sequence such that it has kinase activity, e.g., has elevated activity.

[0723] In one embodiment, the LMNA-NTRK1 fusion includes the full sequence or a fragment of the nucleotide sequence shown in SEQ ID NO:80, or a nucleotide sequence substantially identical thereto. In another embodiment, the LMNA-NTRK1 fusion polypeptide includes the full sequence or a fragment of the amino acid sequence shown in SEQ ID NO:81, or an amino acid sequence substantially identical thereto, for example at least 700% or at least 80% or at least 90% or more identical to this sequence or fragment.

[0724] In another aspect, the invention features a LMNA-NTRK1 fusion polypeptide (e.g., a purified LMNA-NTRK1 fusion polypeptide), a biologically active or antigenic fragment thereof, as well as reagents (e.g., antibody molecules that bind to a LMNA-NTRK1 fusion polypeptide), methods for modulating a LMNA-NTRK1 polypeptide activity and detection of a LMNA-NTRK1 polypeptide.

[0725] In one embodiment, the LMNA-NTRK1 fusion polypeptide has at least one biological activity. In one embodiment, at least one biological activity of the LMNA-NTRK1 fusion polypeptide is reduced or inhibited by an anti-cancer drug, e.g., a LMNA inhibitor, a NTRK1 inhibitor. In one embodiment, at least one biological activity of the LMNA-NTRK1 fusion polypeptide is reduced or inhibited by a NTRK1 inhibitor. In one embodiment, at least one biological activity of the LMNA-NTRK1 fusion polypeptide is reduced or inhibited by a LMNA inhibitor. In one embodiment, at least one biological activity of the LMNA-NTRK1 fusion polypeptide is reduced or inhibited by a NTRK1 inhibitor, e.g., lestaurtinib (CEP-701); AZ-23; indenopyrrolocarboazole 12a; oxindole 3; isothiazole 5n; thiazole 20h.

[0726] In yet other embodiments, the LMNA-NTRK1 fusion polypeptide is encoded by a nucleic acid molecule described herein. In one embodiment, the LMNA-NTRK1 fusion polypeptide is encoded by an in-frame fusion of intron 2 of LMNA with intron 8 of NTRK1 (e.g., a sequence on chromosome 1 and a sequence on chromosome 1). In another embodiment, the LMNA-NTRK1 fusion polypeptide includes an amino acid sequence encoded by a nucleotide sequence comprising a fusion junction between the LMNA transcript and the NTRK1 transcript.

[0727] In certain embodiments, the LMNA-NTRK1 fusion polypeptide comprises one or more of encoded exons 1-2 from LMNA and one or more of encoded exons 9-17 of NTRK1. In certain embodiments, the LMNA-NTRK1 fusion polypeptide comprises at least 1, 2 or more encoded exons of LMNA and at least at least 1, 2, 3, 4, 5, 6, 7, 8, 9 or more encoded exons of NTRK1. In certain embodiments, the LMNA-NTRK fusion polypeptide comprises a fusion of encoded exon 2 from LMNA and encoded exon 9 from NTRK1 (or a fragment thereof). In other embodiments, the fusion comprises at least 1, 2 or more encoded exons of LMNA; and at least 1, 2, 3, 4, 5, 6, 7, 8, 9 or more encoded exons of NTRK1. In certain embodiments, the LMNA-NTRK1 fusion polypeptide comprises encoded exons 1-2 from LMNA and exons 9-17 of NTRK1. In certain embodiments, the 5′ LMNA-3′ NTRK1 fusion polypeptide comprises a fusion junction of the sequence of exon 2 from LMNA and the sequence of exon 9 from NTRK1.

[0728] In certain embodiments, the LMNA-NTRK11 fusion comprises the amino acid sequence corresponding to exon 2 or a fragment thereof from LMNA, and the amino acid sequence corresponding to exon 9 or a fragment thereof from NTRK1 (e.g., as shown in SEQ ID NO:71 and SEQ ID NO:4). In one embodiment, the LMNA-NTRK1 fusion comprises at least 5, 10, 15, 20 or more amino acids from exon 2 of LMNA (e.g., from the amino acid sequence of LMNA preceding the fusion junction with NTRK1, e.g., of the LMNA sequence shown in SEQ ID NO:71), and at least 5, 10, 15, 20 or more amino acids from exon 9 of NTRK1 (e.g., from the amino acid sequence of NTRK1 following the fusion junction with LMNA, e.g., of the NTRK1 sequence shown in SEQ ID NO:4).

[0729] In one embodiment, the LMNA-NTRK1 fusion polypeptide includes a tyrosine kinase domain or a functional fragment thereof. In a related aspect, the invention features LMNA-NTRK1 fusion polypeptide or fragments operatively linked to heterologous polypeptides to form fusion proteins.

[0730] In another embodiment, the LMNA-NTRK1 fusion polypeptide or fragment is a peptide, e.g., an immunogenic peptide or protein containing a fusion junction described herein. Such immunogenic peptides or proteins can be used to raise antibodies specific to the fusion protein. In other embodiments, such immunogenic peptides or proteins can be used for vaccine preparation. The vaccine preparation can include other components, e.g., an adjuvant.

[0731] In another aspect, the invention features antibody molecules that bind to a LMNA-NTRK1 fusion polypeptide or fragment described herein. In embodiments, the antibody can distinguish wild type NTRK1 (or LMNA) from LMNA-NTRK1.

### Detection Reagents and Detection of Mutations

[0732] In another aspect, the invention features a detection reagent, e.g., a purified or an isolated preparation thereof. Detection reagents can distinguish a nucleic acid, or protein sequence, having a breakpoint, e.g., a LMNA-NTRK1 breakpoint; from a reference sequence. In one embodiment, the detection reagent detects (e.g., specifically detects) a LMNA-NTRK1 fusion nucleic acid or a polypeptide, e.g., distinguishes a wild type NTRK1 or another NTRK1 fusion (or LMNA) from a LMNA-NTRK1 nucleic acid (e.g., as described herein in SEQ ID NO:70 and SEQ ID NO:3); or a LMNA-NTRK1 polypeptide (e.g., as described herein in SEQ ID NO:71 and SEQ ID NO:4).

[0733] Detection reagents, e.g., nucleic acid-based detection reagents, can be used to identify mutations in a target nucleic acid, e.g., DNA, e.g., genomic DNA or cDNA, or RNA, e.g., in a sample, e.g., a sample of nucleic acid derived from a neoplastic or tumor cell, e.g., a melanocytic neoplasm, melanoma or metastatic cell. Detection reagents, e.g., antibody-based detection reagents, can be used to identify mutations in a target protein, e.g., in a sample, e.g., a sample of protein derived from, or produced by, a neoplastic or tumor cell, e.g., a melanocytic neoplasm, melanoma or metastatic cell.

### Method of Treatment

[0734] In a related aspect, a method of inhibiting, reducing, or treating a hyperproliferative disorder, e.g., a neoplasm (including benign, pre-malignant or malignant (e.g., a cancer), in a subject is provided. The method includes administering to the subject a preselected therapeutic agent, e.g., an anti-cancer agent (e.g., a kinase inhibitor), as a single agent, or in combination, in an amount sufficient to reduce, inhibit or treat the activity or expression of LMNA-NTRK1 (e.g., a LMNA-NTRK1 fusion described herein), thereby inhibiting, reducing, or treating the hyperproliferative disorder in the subject.

[0735] In one embodiment, the subject treated has a LMNA-NTRK1 fusion; e.g., the subject has a tumor or cancer harboring a LMNA-NTRK1 fusion. In other embodiments, the subject has been previously identified as having a LMNA-NTRK1 fusion. In yet other embodiments, the subject has been previously identified as being likely or unlikely to respond to treatment with a protein kinase inhibitor, e.g., a subject that has previously participated in a clinical trial. In other embodiments, the subject has been previously identified as being likely or unlikely to respond to treatment with a protein kinase inhibitor, based on the presence of the LMNA-NTRK1 fusion. In one embodiment, the subject is a mammal, e.g., a human. In one embodiment, the subject has, or at risk of having a cancer at any stage of disease. In other embodiments, the subject is a patient, e.g., a cancer patient.

[0736] In certain embodiments, the neoplasm or neoplastic cell is a benign, pre-malignant, malignant (cancer) or metastasis. In certain embodiments, the cancer is a solid tumor, a soft tissue tumor, or a metastatic lesion.

[0737] In one embodiment, the neoplasm or neoplastic cell is a benign, pre-malignant, malignant (cancer) or metastasis. In certain embodiments, the cancer is a solid tumor, a soft tissue tumor, or a metastatic lesion. In one embodiment, the cancer is a carcinoma. In one embodiment, the cancer is an adenocarcinoma. In an embodiment, the cancer is a lung adenocarcinoma. In one embodiment, the cancer is chosen from a lung cancer, a pancreatic cancer, melanoma, a colorectal cancer, an esophageal-gastric cancer, a thyroid cancer, or an adenocarcinoma. In one embodiment, the cancer is a thyroid cancer. In one embodiment, the cancer is a papillary thyroid carcinoma. In one embodiment, the cancer is a lung adenocarcinoma. In other embodiment, the lung cancer is chosen from one or more of the following: non-small cell lung cancer (NSCLC), small cell lung cancer (SCLC), squamous cell carcinoma (SCC), adenocarcinoma of the lung, bronchogenic carcinoma, or a combination thereof. In one embodiment, the lung cancer is NSCLC or SCC.

[0738] In one embodiment, the anti-cancer agent is a NTRK1 inhibitor. In one embodiment, the anti-cancer agent is a LMNA inhibitor. In one embodiment, the anti-cancer agent is a kinase inhibitor. In one embodiment, the anti-cancer agent is a NTRK1 inhibitor, e.g., lestaurtinib (CEP-701); AZ-23; indenopyrrolocarboazole 12a; oxindole 3; isothiazole 5n; thiazole 20h.

### LMNA-RET Fusions

[0739] In one embodiment, a fusion includes an in-frame fusion of an exon of Lamin A/C (LMNA), e.g., one more exons of LMNA (e.g., one or more of exons 1-2 LMNA) or a fragment thereof, and an exon of ret proto-oncogene (RET). e.g., one or more exons of a RET (e.g., one or more of exons 12-19 of RET) or a fragment thereof. For example, the LMNA-RET fusion can include an in-frame fusion within an intron of LMNA (e.g., intron 2) or a fragment thereof, with an intron of RET (e.g., intron 8) or a fragment thereof. In one embodiment, the fusion of the LMNA-RET fusion comprises the nucleotide sequence of: chromosome 1 at one or more of a nucleotide (plus or minus 10, 20, 30, 50, 60, 70, 80, 100 or more nucleotides) and chromosome 1 at one or more of a nucleotide (plus or minus 10, 20, 30, 50, 60, 70, 80, 100 or more nucleotides). In one embodiment, the LMNA-RET fusion is a translocation, e.g., a translocation of a portion of chromosome 1 and a portion of chromosome 10.

[0740] In certain embodiments, the LMNA-RET fusion is in a 5′-LMNA to 3′-RET configuration (also referred to herein as “5′-LMNA-RET-3′).” The term “fusion” or “fusion molecule” can refer to a polypeptide or a nucleic acid fusion, depending on the context. It may include a full-length sequence of a fusion or a fragment thereof, e.g., a fusion junction (e.g., a fragment including a portion of LMNA and a portion of RET, e.g., a portion of the LMNA-RET fusion described herein). In one embodiment, the LMNA-RET fusion polypeptide includes a fragment of the amino acid sequence shown in SEQ ID NO:71 and a fragment of the amino acid sequence shown in SEQ ID NO:6, or an amino acid sequence substantially identical thereto. In another embodiment, the LMNA-RET fusion nucleic acid includes a fragment of the nucleotide sequence shown in SEQ ID NO:70 and a fragment of the nucleotide sequence shown in SEQ ID NO:5, or a nucleotide sequence substantially identical thereto. In one embodiment, the LMNA-RET fusion polypeptide comprises sufficient LMNA and sufficient RET sequence such that the 5′ LMNA-3′ RET fusion has kinase activity, e.g., has elevated activity, e.g., tyrosine kinase activity. In any event, the fusion causes activation in the cells harboring it of oncogenic signaling pathways.

[0741] In certain embodiments, the LMNA-RET fusion comprises one or more (or all of) exons 1-2 from LMNA and one or more (or all of) exons 12-19 of RET (e.g., one or more of the exons shown in SEQ ID NO:70 and SEQ ID NO:5. In another embodiment, the LMNA-RET fusion comprises one or more (or all of) exons 1-2 of LMNA and one or more (or all of) exons 12-19 of RET. In certain embodiments, the LMNA-RET fusion comprises at least 1, 2 or more exons (or encoded exons) from LMNA and at least 1, 2, 3, 4, 5, 6, 7, 8, 9 or more exons (or encoded exons) from RET (e.g., from the LMNA and RET sequences shown in SEQ ID NO:70 and SEQ ID NO:71 and SEQ ID NO:5 and SEQ ID NO:6.

[0742] In certain embodiments, the LMNA-RET fusion comprises exons 1-2 or a fragment thereof from LMNA, and exons 12-19 or a fragment thereof from RET (e.g., as shown in SEQ ID NO:70 and SEQ ID NO:5). In one embodiment, the LMNA-RET fusion comprises at least 5, 10, 15, 20, 30, 40, 50 or more amino acids from exons 1-2 of LMNA (e.g., from the amino acid sequence of LMNA as shown in SEQ ID NO:71 (e.g., from the amino acid sequence of LMNA preceding the fusion junction with RET, and at least 5, 10, 15, 20, 30, 40, 50 or more amino acids from exons 12-19 of RET (e.g., from the amino acid sequence of RET as shown SEQ ID NO:6). In another embodiment, the LMNA-RET fusion comprises at least 6, 12, 15, 20, 25, 50, 75, 100 or more nucleotides from exons 1-2 of LMNA (e.g., from the nucleotide sequence of LMNA as shown in SEQ ID NO:70 (e.g., from the nucleotide sequence of LMNA preceding the fusion junction with RET); and at least 6, 12, 15, 20, 25, 50, 75, 100 or more nucleotides from exons 12-19 of RET (e.g., from the nucleotide sequence of RET as shown in SEQ ID NO:5).

[0743] In one embodiment, the LMNA-RET fusion includes the full sequence or a fragment of the nucleotide sequence shown in SEQ ID NO:110, or a nucleotide sequence substantially identical thereto. In another embodiment, the LMNA-RET fusion polypeptide includes the full sequence or a fragment of the amino acid sequence shown in SEQ ID NO: 111, or an amino acid sequence substantially identical thereto. The sequences SEQ ID NO:110 and SEQ ID NO: 111 have been predicted from sequencing information by reference to NM_{—}005572 for protein LMNA and NM_{—}020975 for kinase RET.

### LMNA-RET Nucleic Acid Molecules

[0744] In one aspect, the invention features a nucleic acid molecule (e.g., an isolated or purified) nucleic acid molecule that includes a fragment of a LMNA gene and a fragment of a RET gene. In one embodiment, the nucleotide sequence encodes a LMNA-RET fusion polypeptide that includes a tyrosine kinase domain or a functional fragment thereof. In another embodiment, the nucleotide sequence encodes a fragment of the RET polypeptide including the amino acid sequence of SEQ ID NO:6 or a fragment thereof, or a sequence substantially identical thereto.

[0745] In one embodiment, the nucleic acid molecule includes a fusion. e.g., an in-frame fusion, between an intron of LMNA (e.g., intron 2 or a fragment thereof), and an intron of RET (e.g., intron 8, or a fragment thereof). The LMNA-RET fusion can comprise a fusion of the nucleotide sequence of: chromosome 1 at one or more of a nucleotide (plus or minus 10, 20, 30, 50, 60, 70, 80, 100 nucleotides) and chromosome 1 at one or more of a nucleotide (plus or minus 10, 20, 30, 50, 60, 70, 80, 100 nucleotides), or a fragment thereof. In one embodiment, the LMNA-RET fusion comprises a fusion of the nucleotide sequence of: chromosome 1 at one or more of a nucleotide (plus or minus 10, 20, 30, 50, 60, 70, 80, 100 nucleotides) and chromosome 10 at one or more of a nucleotide (plus or minus 10, 20, 30, 50, 60, 70, 80, 100 nucleotides), or a fragment thereof.

[0746] In another embodiment, the LMNA-RET fusion comprises a nucleotide sequence (e.g., a fragment of a nucleotide sequence) shown in SEQ ID NO:70 and a nucleotide sequence (e.g., a fragment of a nucleotide sequence) shown in SEQ ID NO:5, or a fragment of the fusion. In one embodiment, the LMNA-RET fusion comprises a nucleotide sequence substantially identical to the nucleotide sequence (e.g., a fragment of a nucleotide sequence) shown in SEQ ID NO:70 and the nucleotide sequence (e.g., a fragment of a nucleotide sequence) shown SEQ ID NO:5, or a fragment of the fusion. In one embodiment, the LMNA-RET fusion comprises a nucleotide sequence at least 70%, at least 75%, at least 80%, at least 85%, at least 90%, at least 95%, at least 99%, at least 99.5 or greater, identical to the nucleotide sequence (e.g., a fragment of a nucleotide sequence) shown in SEQ ID NO:70 and to the nucleotide sequence (e.g., a fragment of a nucleotide sequence) shown in SEQ ID NO:5. In one embodiment, the LMNA-RET fusion comprises a nucleotide sequence containing at least 25, 50, 100, 150, 200, 500, 1000, 1500, 2000, 2500, 3000, or more nucleotides of the nucleotide sequence shown in SEQ ID NO:70 and a nucleotide sequence containing at least 25, 50, 100, 150, 200, 500, 1000, 1500, 2000, 2500, 3000, or more nucleotides of the nucleotide sequence shown in SEQ ID NO:5. In one embodiment, the LMNA-RET fusion comprises a nucleotide sequence containing at least 25, 50, 100, 150, 200, 500, 1000, 1500, 2000, 2500, 3000, or more contiguous nucleotides of the nucleotide sequence shown in 155 SEQ ID NO:70 and a nucleotide sequence containing at least 25, 50, 100, 150, 200, 500, 1000, 1500, 2000, 2500, 3000, or more nucleotides of the nucleotide sequence shown in SEQ ID NO:5.

[0747] In another embodiment, the nucleic acid molecule includes a fusion, e.g., an in-frame fusion, of at least 1, 2 or more exons of LMNA or a fragment thereof (e.g., one or more of exons 1-2 of LMNA or a fragment thereof), and at least 1, 2, 3, 4, 5, 6, 7, 8, 9 or more exons of RET or a fragment thereof (e.g., one or more of exons 12-19 of RET or a fragment thereof). In yet other embodiments, the nucleic acid molecule includes a fragment the nucleotide sequence shown in SEQ ID NO:70 and a fragment of the nucleotide sequence shown in SEQ ID NO:5 or a fragment of the fusion, or a sequence substantially identical thereto.

[0748] In one embodiment, the nucleic acid molecule is complementary to at least a portion of a nucleotide sequence disclosed herein, e.g., is capable of hybridizing under a stringency condition described herein to SEQ ID NO:70 and/or SEQ ID NO:5, or a fragment thereof. In yet another embodiment, the nucleic acid molecule hybridizes to a nucleotide sequence that is complementary to at least a portion of a nucleotide sequence disclosed herein, e.g., is capable of hybridizing under a stringency condition to a nucleotide sequence complementary to SEQ ID NO:70 and/or SEQ ID NO:5, or a fragment thereof. The nucleotide sequence of a cDNA encoding an exemplary 5′ LMNA-3′ RET fusion is shown in at least exon 2 (e.g., exons 1-2) of SEQ ID NO:70 and at least exon 9 (e.g., exons 12-19) of SEQ ID NO:5, and the predicted amino acid sequence is shown in the corresponding encoded exons of SEQ ID NO:71 and the corresponding encoded exons of SEQ ID NO:6, respectively.

[0749] In an embodiment the LMNA-RET nucleic acid molecule comprises sufficient LMNA and sufficient RET sequence such that the encoded 5′ LMNA-3′ RET fusion has kinase activity, e.g., has elevated activity. In certain embodiments, the 5′ LMNA-3′ RET fusion comprises exons 1-2 from LMNA and exons 12-19 from RET. In certain embodiments, the LMNA-RET fusion comprises at least 1, 2 or more exons from LMNA and at least at least 1, 2, 3, 4, 5, 6, 7, 8, 9 or more exons of RET. In certain embodiments, the LMNA-RET fusion comprises a fusion of exon 2 from LMNA and exon 9 from RET. In another embodiment, the LMNA-RET fusion comprises 1, 2 or more exons of LMNA; and at least 1, 2, 3, 4, 5, 6, 7, 8, 9 or more exons of RET.

[0750] In one embodiment, the nucleic acid molecule includes a nucleotide sequence that has an in-frame fusion of intron 2 of LMNA (e.g., NM_{—}001126113) with intron 8 of RET (e.g., NM_{—}020630). In another embodiment, the nucleic acid molecule includes a nucleotide sequence that includes a breakpoint. For example, the nucleic acid molecule includes a nucleotide sequence that includes the fusion junction between the LMNA gene and the RET gene, e.g., the breakpoint between intron 2 or intron 9 or intron 11 or intron 12 of LMNA and intron 2 of RET. In other embodiments, the nucleic acid molecules includes a nucleotide sequence of one or more of nucleotide of chromosome 1 coupled to (e.g., directly or indirectly juxtaposed to) one or more of nucleotide of chromosome 1. In one embodiment, the nucleic acid molecule includes the nucleotide sequence of: chromosome 1 at one or more of a nucleotide plus or minus 10, 20, 30, 40 50, 60, 80, 100, 150 nucleotides and chromosome 1 at one or more of a nucleotide plus or minus 10, 20, 30, 40 50, 60, 80, 100, 150 nucleotides (corresponding to the breakpoint of a LMNA-RET fusion), or a fragment thereof, or a sequence substantially identical thereto. In one embodiment, the nucleic acid molecule is complementary to at least a portion of a nucleotide sequence disclosed herein, e.g., is capable of hybridizing under a stringency condition described herein to SEQ ID NO:70 and/or SEQ ID NO:5 or a fragment thereof. In yet other embodiment, the nucleic acid molecule hybridizes to a nucleotide sequence that is complementary to at least a portion of a nucleotide sequence disclosed herein, e.g., is capable of hybridizing under a stringency condition described herein to a nucleotide sequence complementary to SEQ ID NO:70 or SEQ ID NO:5 or a fragment thereof.

[0751] In another embodiment, the LMNA-RET fusion nucleic acid comprises at least 6, 12, 15, 20, 25, 50, 75, 100 or more nucleotides from exon 2 or exon 9 or exon 11 or exon 12 of LMNA (e.g., from the nucleotide sequence of LMNA preceding the fusion junction with RET, e.g., of the LMNA sequence shown in SEQ ID NO:70), and at least 6, 12, 15, 20, 25, 50, 75, 100 or more nucleotides from exon 9 of RET (e.g., from the nucleotide sequence of RET following the fusion junction with LMNA. e.g., of the RET sequence shown in SEQ ID NO:5).

[0752] In other embodiments, the nucleic acid molecule includes a nucleotide sequence encoding a LMNA-RET fusion polypeptide that includes a fragment of a LMNA gene and a fragment of a RET gene. In one embodiment, the nucleotide sequence encodes a LMNA-RET fusion polypeptide that includes e.g., a tyrosine kinase domain or a functional fragment thereof. In yet other embodiments, the nucleic acid molecule includes a nucleotide sequence encoding the amino acid sequence (e.g., a fragment of the amino acid sequence) shown in SEQ ID NO:71 and a nucleotide sequence encoding the amino acid sequence (e.g., a fragment of the amino acid sequence) shown in SEQ ID NO:6, or a fragment of the fusion, or a sequence substantially identical thereto. In one embodiment, the encoded LMNA-RET fusion polypeptide includes a tyrosine kinase domain or a functional fragment thereof.

[0753] In a related aspect, the invention features nucleic acid constructs that include the LMNA-RET nucleic acid molecules described herein. In certain embodiments, the nucleic acid molecules are operatively linked to a native or a heterologous regulatory sequence. Also included are vectors and host cells that include the LMNA-RET nucleic acid molecules described herein, e.g., vectors and host cells suitable for producing the nucleic acid molecules and polypeptides described herein.

[0754] In a related aspect, methods of producing the nucleic acid molecules and polypeptides described herein are also described.

[0755] In another aspect, the invention features nucleic acid molecules that reduce or inhibit the expression of a nucleic acid molecule that encodes a LMNA-RET fusion described herein. Examples of such nucleic acid molecules include, for example, antisense molecules, ribozymes, RNAi, triple helix molecules that hybridize to a nucleic acid encoding LMNA-RET, or a transcription regulatory region of LMNA-RET, and blocks or reduces mRNA expression of LMNA-RET.

### Nucleic Acid Detection and Capturing Reagents

[0756] The invention also features a nucleic acid molecule, e.g., nucleic acid fragment, suitable as probe, primer, bait or library member that includes, flanks, or hybridizes to the LMNA-RET fusions described herein. Such nucleic acid molecules are useful for identifying, or are otherwise based on, the LMNA-RET fusions described herein. In certain embodiments, the probe, primer or bait molecule is an oligonucleotide that allows capture, detection or isolation of a LMNA-RET fusion nucleic acid molecule described herein. The oligonucleotide can comprise a nucleotide sequence substantially complementary to a fragment of the LMNA-RET fusion nucleic acid molecules described herein. The sequence identity between the nucleic acid fragment, e.g., the oligonucleotide, and the target LMNA-RET sequence need not be exact, so long as the sequences are sufficiently complementary to allow the capture, detection or isolation of the target sequence. In one embodiment, the nucleic acid fragment is a probe or primer that includes an oligonucleotide between about 5 and 25, e.g., between 10 and 20, or 10 and 15 nucleotides in length. In other embodiments, the nucleic acid fragment is a bait that includes an oligonucleotide between about 100 to 300 nucleotides, 130 and 230 nucleotides, or 150 and 200 nucleotides, in length.

[0757] In one embodiment, the nucleic acid fragment can be used to identify or capture, e.g., by hybridization, a LMNA-RET fusion. For example, the nucleic acid fragment can be a probe, a primer, or a bait, for use in identifying or capturing, e.g., by hybridization, a LMNA-RET fusion described herein. In one embodiment, the nucleic acid fragment can be useful for identifying or capturing a LMNA-RET breakpoint, e.g., the nucleotide sequence of: chromosome 1 at nucleotide plus or minus 10, 20, 30, 40, 50, 60, 80, 100, 150 nucleotides and chromosome 1 at nucleotide plus or minus 10, 20, 30, 40 50, 60, 80, 100, 150 nucleotides.

[0758] In one embodiment, the nucleic acid fragment hybridizes to a nucleotide sequence within a chromosomal rearrangement that creates an in-frame fusion of intron 2 or intron 9 or intron 1 or intron 12 of LMNA with intron 8 of RET. In one embodiment, the nucleic acid fragment hybridizes to a nucleotide sequence in the region In other embodiments, the nucleic acid molecules includes a nucleotide sequence in the region of a nucleotide sequence of chromosome 1 coupled to (e.g., juxtaposed to) nucleotides in the region of a nucleotide sequence of chromosome 10. In one embodiment, the nucleic acid fragment hybridizes to a nucleotide sequence that includes a breakpoint, e.g., the nucleotide sequence of: chromosome 1 at nucleotide plus or minus 10, 20, 30, 40, 50, 60, 80, 100, 150 or more nucleotides and chromosome 1 at nucleotide plus or minus 10, 20, 30, 40 50, 60, 80, 100, 150 or more nucleotides. For example, the nucleic acid fragment can hybridize to a nucleotide sequence that includes the fusion junction between the LMNA gene and the RET gene, e.g., a nucleotide sequence that includes a portion of a nucleotide sequence within intron 2 or intron 9 or intron 11 or intron 12 of a LMNA gene and intron 2 of a RET gene.

[0759] In another embodiment, the nucleic acid fragment hybridizes to a nucleotide sequence that comprises at least 6, 12, 15, 20, 25, 50, 75, 100, 150 or more nucleotides from exon 2 or exon 9 or exon 11 or exon 12 of LMNA (e.g., from the nucleotide sequence of LMNA preceding the fusion junction with RET, e.g., of the LMNA sequence shown in SEQ ID NO:70), and at least 6, 12, 15, 20, 25, 50, 75, 100, 150 or more nucleotides from exon 9 of RET (e.g., from the nucleotide sequence of RET following the fusion junction with LMNA, e.g., of the RET sequence shown in SEQ ID NO:5).

[0760] The probes or primers described herein can be used, for example, for FISH detection or PCR amplification. In one exemplary embodiment where detection is based on PCR, amplification of the LMNA-RET fusion junction fusion junction can be performed using a primer or a primer pair, e.g., for amplifying a sequence flanking the fusion junctions described herein, e.g., the mutations or the junction of a chromosomal rearrangement described herein, e.g., LMNA-RET.

[0761] In one embodiment, a pair of isolated oligonucleotide primers can amplify a region containing or adjacent to a position in the LMNA-RET fusion. For example, forward primers can be designed to hybridize to a nucleotide sequence within LMNA genomic or mRNA sequence (e.g., a nucleotide sequence within exon 2 of LMNA of SEQ ID NO:70, and the reverse primers can be designed to hybridize to a nucleotide sequence of RET (e.g., a nucleotide sequence within exon 9 of RET, of SEQ ID NO:5.

[0762] In another embodiment, the nucleic acid fragments can be used to identify. e.g., by hybridization, a LMNA-RET fusion. In one embodiment, the nucleic acid fragment hybridizes to a nucleotide sequence that includes a fusion junction between the LMNA transcript and the RET transcript.

[0763] In other embodiments, the nucleic acid fragment includes a bait that comprises a nucleotide sequence that hybridizes to a LMNA-RET fusion nucleic acid molecule under stringent conditions as described herein, and thereby allows the capture or isolation said nucleic acid molecule. In one embodiment, a bait is suitable for solution phase hybridization. In other embodiments, a bait includes a binding entity, e.g., an affinity tag, that allows capture and separation, e.g., by binding to a binding entity, of a hybrid formed by a bait and a nucleic acid hybridized to the bait.

[0764] In other embodiments, the nucleic acid fragment includes a library member comprising a LMNA-RET nucleic acid molecule described herein. In one embodiment, the library member includes a rearrangement that results in a LMNA-RET fusion described herein.

[0765] The nucleic acid fragment can be detectably labeled with, e.g., a radiolabel, a fluorescent label, a bioluminescent label, a chemiluminescent label, an enzyme label, a binding pair label, or can include an affinity tag; a tag, or identifier (e.g., an adaptor, barcode or other sequence identifier).

### LMNA-RET Fusion Polypeptides

[0766] In another embodiment, the LMNA-RET fusion comprises an amino acid sequence (e.g., a fragment of the amino acid sequence) shown in SEQ ID NO:71 and an amino acid sequence (e.g., a fragment of the amino acid sequence) shown in SEQ ID NO:6, or a fragment of the fusion. In one embodiment, the LMNA-RET fusion comprises an amino acid sequence substantially identical to the amino acid sequence (e.g., a fragment of the amino acid sequence) shown in SEQ ID NO:71290 and the amino acid sequence (e.g., a fragment of the amino acid sequence) shown in SEQ ID NO:6, or a fragment thereof. In one embodiment, the LMNA-RET fusion comprises an amino acid sequence at least 70%, at least 75%, at least 80%, at least 85%, at least 90%, at least 95%, at least 99%, at least 99.5 or greater, identical to the amino acid sequence (e.g., a fragment of the amino acid sequence) shown in SEQ ID NO:71 and the amino acid sequence (e.g., a fragment of the amino acid sequence) shown in SEQ ID NO:6. In one embodiment, the LMNA-RET fusion comprises a sequence containing at least 10, 20, 50, 100, 500, 600, 700, 800, 900, 1000, or more amino acids of the amino acid sequence shown in SEQ ID NO:71 and SEQ ID NO:6. In one embodiment, the LMNA-RET fusion comprises an amino acid sequence containing at least 5, 10, 20, 50, 100, 500, 600, 700, 800, 900, 1000, or more contiguous amino acids of the amino acid sequence shown in 156 SEQ ID NO:71 and at least 5, 10, 20, 50, 100, 500, 600, 700, 800, 900, 1000, or more contiguous amino acids of the amino acid sequence shown in SEQ ID NO:6. In one embodiment, the 5′ LMNA-3′ RET fusion polypeptide includes a receptor tyrosine kinase domain or a functional fragment thereof. In an embodiment, the 5′LMNA-3′RET fusion polypeptide comprises sufficient RET and sufficient LMNA sequence such that it has kinase activity, e.g., has elevated activity.

[0767] In one embodiment, the LMNA-RET fusion includes the full sequence or a fragment of the nucleotide sequence shown in SEQ ID NO:110 or a nucleotide sequence substantially identical thereto. In another embodiment, the LMNA-RET fusion polypeptide includes the full sequence or a fragment of the amino acid sequence shown in SEQ ID NO: 111, or an amino acid sequence substantially identical thereto.

[0768] In another aspect, the invention features a LMNA-RET fusion polypeptide (e.g., a purified LMNA-RET fusion polypeptide), a biologically active or antigenic fragment thereof, as well as reagents (e.g., antibody molecules that bind to a LMNA-RET fusion polypeptide), methods for modulating a LMNA-RET polypeptide activity and detection of a LMNA-RET polypeptide.

[0769] In one embodiment, the LMNA-RET fusion polypeptide has at least one biological activity. In one embodiment, at least one biological activity of the LMNA-RET fusion polypeptide is reduced or inhibited by an anti-cancer drug, e.g., a LMNA inhibitor, a RET inhibitor. In one embodiment, at least one biological activity of the LMNA-RET fusion polypeptide is reduced or inhibited by a RET inhibitor. In one embodiment, at least one biological activity of the LMNA-RET fusion polypeptide is reduced or inhibited by a LMNA inhibitor. In one embodiment, at least one biological activity of the LMNA-RET fusion polypeptide is reduced or inhibited by a RET inhibitor. e.g., lestaurtinib (CEP-701); AZ-23; indenopyrrolocarboazole 12a; oxindole 3; isothiazole 5n; thiazole 20h.

[0770] In yet other embodiments, the LMNA-RET fusion polypeptide is encoded by a nucleic acid molecule described herein. In one embodiment, the LMNA-RET fusion polypeptide is encoded by an in-frame fusion of intron 2 of LMNA with intron 8 of RET (e.g., a sequence on chromosome 1 and a sequence on chromosome 1). In another embodiment, the LMNA-RET fusion polypeptide includes an amino acid sequence encoded by a nucleotide sequence comprising a fusion junction between the LMNA transcript and the RET transcript.

[0771] In certain embodiments, the LMNA-RET fusion polypeptide comprises one or more of encoded exons 1-2 from LMNA and one or more of encoded exons 12-19 of RET. In certain embodiments, the LMNA-RET fusion polypeptide comprises at least 1, 2 or more encoded exons of LMNA and at least at least 1, 2, 3, 4, 5, 6, 7, 8, 9 or more encoded exons of RET. In certain embodiments, the LMNA-RET fusion polypeptide comprises a fusion of encoded exon 2 from LMNA and encoded exon 9 from RET (or a fragment thereof). In other embodiments, the fusion comprises at least 1, 2 or more encoded exons of LMNA; and at least 1, 2, 3, 4, 5, 6, 7, 8, 9 or more encoded exons of RET. In certain embodiments, the LMNA-RET fusion polypeptide comprises encoded exons 1-2 from LMNA and exons 12-19 of RET. In certain embodiments, the 5′ LMNA-3′ RET fusion polypeptide comprises a fusion junction of the sequence of exon 2 from LMNA and the sequence of exon 9 from RET.

[0772] In certain embodiments, the LMNA-RET fusion comprises the amino acid sequence corresponding to exon 2 or a fragment thereof from LMNA, and the amino acid sequence corresponding to exon 9 or a fragment thereof from RET (e.g., as shown in SEQ ID NO:71 and SEQ ID NO:6). In one embodiment, the LMNA-RET fusion comprises at least 5, 10, 15, 20 or more amino acids from exon 2 of LMNA (e.g., from the amino acid sequence of LMNA preceding the fusion junction with RET, e.g., of the LMNA sequence shown in SEQ ID NO:71), and at least 5, 10, 15, 20 or more amino acids from exon 9 of RET (e.g., from the amino acid sequence of RET following the fusion junction with LMNA, e.g., of the RET sequence shown in SEQ ID NO:6).

[0773] In one embodiment, the LMNA-RET fusion polypeptide includes a tyrosine kinase domain or a functional fragment thereof. In a related aspect, the invention features LMNA-RET fusion polypeptides or fragments operatively linked to heterologous polypeptides to form fusion proteins.

[0774] In another embodiment, the LMNA-RET fusion polypeptide or fragment is a peptide, e.g., an immunogenic peptide or protein. The peptide contains a fusion junction described herein. Such immunogenic peptides or proteins can be used to raise antibodies specific to the fusion protein. Such antibodies can serve to identify the fusion. In other embodiments, such immunogenic peptides or proteins can be used for vaccine preparation. The vaccine preparation can include other components, e.g., an adjuvant.

[0775] In another aspect, the invention features antibody molecules that bind to a LMNA-RET fusion polypeptide or fragment described herein. In some embodiments, the antibody can distinguish wild type RET (or LMNA) from LMNA-RET.

### Detection Reagents and Detection of Mutations

[0776] In another aspect, the invention features a detection reagent, e.g., a purified or an isolated preparation thereof. Detection reagents can distinguish a nucleic acid, or protein sequence, having a breakpoint, e.g., a LMNA-RET breakpoint; from a reference sequence. In one embodiment, the detection reagent detects (e.g., specifically detects) a LMNA-RET fusion nucleic acid or a polypeptide, e.g., distinguishes a wild type RET or another RET fusion (or LMNA) from a LMNA-RET nucleic acid (e.g., as described herein in SEQ ID NO:70 and SEQ ID NO:5); or a LMNA-RET polypeptide (e.g., as described herein in SEQ ID NO:71 and SEQ ID NO:6).

[0777] Detection reagents, e.g., nucleic acid-based detection reagents, can be used to identify mutations in a target nucleic acid, e.g., DNA, e.g., genomic DNA or cDNA, or RNA. e.g., in a sample, e.g., a sample of nucleic acid derived from a neoplastic or tumor cell, e.g., a melanocytic neoplasm, melanoma or metastatic cell. Detection reagents, e.g., antibody-based detection reagents, can be used to identify mutations in a target protein, e.g., in a sample, e.g., a sample of protein derived from, or produced by, a neoplastic or tumor cell, e.g., a melanocytic neoplasm, melanoma or metastatic cell.

### Method of Treatment

[0778] In a related aspect, a method of inhibiting, reducing, or treating a hyperproliferative disorder, e.g., a neoplasm (including benign, pre-malignant or malignant (e.g., a cancer), in a subject is provided. The method includes administering to the subject a preselected therapeutic agent, e.g., an anti-cancer agent (e.g., a kinase inhibitor), as a single agent, or in combination, in an amount sufficient to reduce, inhibit or treat the activity or expression of LMNA-RET (e.g., a LMNA-RET fusion described herein), thereby inhibiting, reducing, or treating the hyperproliferative disorder in the subject.

[0779] In one embodiment, the subject treated has a LMNA-RET fusion; e.g., the subject has a tumor or cancer harboring a LMNA-RET fusion. In other embodiments, the subject has been previously identified as having a LMNA-RET fusion. In yet other embodiments, the subject is or has been previously identified as being likely or unlikely to respond to treatment with a protein kinase inhibitor, e.g., a subject that has previously participated in a clinical trial or a subject that is being tested for the presence of a fusion as described herein. In other embodiments, the subject is or has been previously identified as being likely or unlikely to respond to treatment with a protein kinase inhibitor, based on the presence of the LMNA-RET fusion. In one embodiment, the subject is a mammal, e.g., a human. In one embodiment, the subject has, or is at risk of having a cancer at any stage of disease. In other embodiments, the subject is a patient, e.g., a cancer patient.

[0780] In certain embodiments, the neoplasm or neoplastic cell is a benign, pre-malignant, malignant (cancer) or metastasis. In certain embodiments, the cancer is a solid tumor, a soft tissue tumor, or a metastatic lesion.

[0781] In one embodiment, the neoplasm or neoplastic cell is a benign, pre-malignant, malignant (cancer) or metastasis. In certain embodiments, the cancer is a solid tumor, a soft tissue tumor, or a metastatic lesion. In one embodiment, the cancer is a carcinoma. In one embodiment, the cancer is an adenocarcinoma. In an embodiment, the cancer is a lung adenocarcinoma. In one embodiment, the cancer is chosen from a lung cancer, a pancreatic cancer, melanoma, a colorectal cancer, an esophageal-gastric cancer, a thyroid cancer, or an adenocarcinoma. In one embodiment, the cancer is a thyroid cancer. In one embodiment, the cancer is a papillary thyroid carcinoma. In one embodiment, the cancer is a lung adenocarcinoma. In other embodiment, the lung cancer is chosen from one or more of the following: non-small cell lung cancer (NSCLC), small cell lung cancer (SCLC), squamous cell carcinoma (SCC), adenocarcinoma of the lung, bronchogenic carcinoma, or a combination thereof. In one embodiment, the lung cancer is NSCLC or SCC.

[0782] In one embodiment, the anti-cancer agent is a RET inhibitor. In one embodiment, the anti-cancer agent is a LMNA inhibitor. In one embodiment, the anti-cancer agent is a kinase inhibitor. In one embodiment, the anti-cancer agent is a RET inhibitor, e.g., lestaurtinib (CEP-701); AZ-23; indenopyrrolocarboazole 12a; oxindole 3; isothiazole 5n; thiazole 20h.

### FMN1-ROS1 Fusions

[0783] In one embodiment, a fusion includes an in-frame fusion of an exon of formin 1 (FMN1), e.g., one more exons of FMN1 (e.g., one or more of exons 1-23 of FMN1) or a fragment thereof, and an exon of C-Ros oncogene 1 (ROS1), e.g., one or more exons of a ROS1 (e.g., one or more of exons 35-43 of ROS1) or a fragment thereof. For example, the FMN1-ROS1 fusion can include an in-frame fusion within an intron of FMN1 (e.g., intron 23) or a fragment thereof, with an intron of ROS1 (e.g., intron 34) or a fragment thereof. In one embodiment, the fusion of the FMN1-ROS1 fusion comprises the nucleotide sequence of: chromosome 15 at one or more of a nucleotide (plus or minus 10, 20, 30, 50, 60, 70, 80, 100 or more nucleotides) and chromosome 6 at one or more of a nucleotide (plus or minus 10, 20, 30, 50, 60, 70, 80, 100 or more nucleotides). In one embodiment, the FMN1-ROS1 fusion is a translocation, e.g., a translocation of a portion of chromosome 15 and a portion of chromosome 6.

[0784] In certain embodiments, the FMN1-ROS1 fusion is in a 5′-FMN1 to 3′-ROS1 configuration (also referred to herein as “5′-FMN1-ROS1-3′).” The term “fusion” or “fusion molecule” can refer to a polypeptide or a nucleic acid fusion, depending on the context. It may include a full-length sequence of a fusion or a fragment thereof, e.g., a fusion junction (e.g., a fragment including a portion of FMN1 and a portion of ROS1, e.g., a portion of the FMN1-ROS1 fusion described herein). In one embodiment, the FMN1-ROS1 fusion polypeptide includes a fragment of the amino acid sequence shown in SEQ ID NO:73 and a fragment of the amino acid sequence shown in SEQ ID NO: 12, or an amino acid sequence substantially identical thereto. In another embodiment, the FMN1-ROS1 fusion nucleic acid includes a fragment of the nucleotide sequence shown in SEQ ID NO:72 and a fragment of the nucleotide sequence shown in SEQ ID NO: 11, or a nucleotide sequence substantially identical thereto. In one embodiment, the FMN1-ROS1 fusion polypeptide comprises sufficient FMN1 and sufficient ROS1 sequence such that the 5′ FMN1-3′ ROS1 fusion has kinase activity, e.g., has elevated activity, e.g., tyrosine kinase activity. In any event, the fusion causes activation in the cells harboring it of oncogenic signaling pathways.

[0785] In certain embodiments, the FMN1-ROS1 fusion comprises one or more (or all of) exons 1-23 from FMN1 and one or more (or all of) exons 35-43 of ROS1 (e.g., one or more of the exons shown in SEQ ID NO:72 and SEQ ID NO: 11. In another embodiment, the FMN1-ROS1 fusion comprises one or more (or all of) exons 1-23 of FMN1 and one or more (or all of) exons 35-43 of ROS1. In certain embodiments, the FMN1-ROS1 fusion comprises at least 1, 2, 3, 4, 5, 6, 7, 8, 9, 10, 11, 12, 13, 14, 15, 16, 17, 18, 19, 20, 21, 22, 23 or more exons (or encoded exons) from FMN1 and at least 1, 2, 3, 4, 5, 6, 7, 8, 9 or more exons (or encoded exons) from ROS1 (e.g., from the FMN1 and ROS1 sequences shown in SEQ ID NO:72 and SEQ ID NO:73 and SEQ ID NO:11 and SEQ ID NO: 12.

[0786] In certain embodiments, the FMN1-ROS1 fusion comprises exons 1-23 or a fragment thereof from FMN1, and exons 35-43 or a fragment thereof from ROS1 (e.g., as shown in SEQ ID NO:72 and SEQ ID NO: 11). In one embodiment, the FMN1-ROS1 fusion comprises at least 5, 10, 15, 20, 30, 40, 50 or more amino acids from exons 1-23 of FMN1 (e.g., from the amino acid sequence of FMN1 as shown in SEQ ID NO:73 (e.g., from the amino acid sequence of FMN1 preceding the fusion junction with ROS1, and at least 5, 10, 15, 20, 30, 40, 50 or more amino acids from exons 35-43 of ROS1 (e.g., from the amino acid sequence of ROS1 as shown in SEQ ID NO: 12). In another embodiment, the FMN1-ROS1 fusion comprises at least 6, 12, 15, 20, 25, 50, 75, 100 or more nucleotides from exons 1-23 of FMN1 (e.g., from the nucleotide sequence of FMN1 as shown in 125 (SEQ ID NO:72) (e.g., from the nucleotide sequence of FMN1 preceding the fusion junction with ROS1); and at least 6, 12, 15, 20, 25, 50, 75, 100 or more nucleotides from exons 35-43 of ROS1 (e.g., from the nucleotide sequence of ROS1 as shown in 112 (SEQ ID NO:11)).

[0787] In one embodiment, the FMN1-ROS1 fusion includes the full sequence or a fragment of the nucleotide sequence shown in SEQ ID NO: 112, or a nucleotide sequence substantially identical thereto. In another embodiment, the FMN1-ROS1 fusion polypeptide includes the full sequence or a fragment of the amino acid sequence shown in SEQ ID NO: 113, or an amino acid sequence substantially identical thereto. The sequences SEQ ID NO: 112 and SEQ ID NO: 113 have been deduced from sequencing information by reference to NM_{—}001277313 for protein FMN1 and NM_{—}002944 for kinase ROS1.

### FMN1-ROS1 Nucleic Acid Molecules

[0788] In one aspect, the invention features a nucleic acid molecule (e.g., an isolated or purified) nucleic acid molecule that includes a fragment of a FMN1 gene and a fragment of a ROS1 gene. In one embodiment, the nucleotide sequence encodes a FMN1-ROS1 fusion polypeptide that includes a tyrosine kinase domain or a functional fragment thereof. In another embodiment, the nucleotide sequence encodes a fragment of the ROS1 polypeptide including the amino acid sequence of SEQ ID NO: 12 or a fragment thereof, or a sequence substantially identical thereto. In other embodiments, the nucleic acid molecule includes a fragment of the FMN1 gene encoding the amino acid sequence of SEQ ID NO:73 or a fragment thereof, or a sequence substantially identical thereto, for example 90% identical. In yet other embodiments, the nucleic acid molecule includes a nucleotide sequence encoding the amino acid sequence shown in 126 SEQ ID NO:73, or a fragment thereof, and the amino acid sequence shown in 113 SEQ ID NO:12 or a fragment thereof, or a sequence substantially identical thereto, for example a sequence at least 70%, or at least 80% or at least 90% or an even higher percentage identical.

[0789] In one embodiment, the nucleic acid molecule includes a fusion, e.g., an in-frame fusion, between an intron of FMN1 (e.g., intron 23, or a fragment thereof), and an intron of ROS1 (e.g., intron 34, or a fragment thereof). The FMN1-ROS1 fusion can comprise a fusion of the nucleotide sequence of one or more introns and/or exons with a nucleic acid encoding a protein partner on chromosome 15. The insertion of the nucleic acid encoding the kinase domain results in a fusion junction between the nucleic acid encoding the kinase domain or introns surrounding the kinase domain and a fusion junction between the nucleic acid encoding the kinase domain and the remainder of the chromosome (for example, at the 3′ end of the kinase domain). Examples of the locations of the junctions on chromosome 15 are set forth in additional disclosure Paragraphs JJ-LL. The fusion junctions can be found on chromosome 15 at one or more of a nucleotide (plus or minus 10, 20, 30, 50, 60, 70, 80, 100 nucleotides) and chromosome 6 at one or more of a nucleotide (plus or minus 10, 20, 30, 50, 60, 70, 80, 100 nucleotides), or a fragment thereof. In one embodiment, the HLA-A-ROS1 fusion comprises a fusion of the nucleotide sequence of: chromosome 15 at one or more of a nucleotide (plus or minus 10, 20, 30, 50, 60, 70, 80, 100 nucleotides) and chromosome 6 at one or more of a nucleotide (plus or minus 10, 20, 30, 50, 60, 70, 80, 100 nucleotides), or a fragment thereof.

[0790] In another embodiment, the FMN1-ROS1 fusion comprises a nucleotide sequence (e.g., a fragment of a nucleotide sequence) shown in SEQ ID NO:72 and a nucleotide sequence (e.g., a fragment of a nucleotide sequence) shown in SEQ ID NO:11, or a fragment of the fusion. In one embodiment, the FMN1-ROS1 fusion comprises a nucleotide sequence substantially identical to the nucleotide sequence (e.g., a fragment of a nucleotide sequence) shown in SEQ ID NO:72 and the nucleotide sequence (e.g., a fragment of a nucleotide sequence) shown SEQ ID NO: 11, or a fragment of the fusion. In one embodiment, the FMN1-ROS1 fusion comprises a nucleotide sequence at least 70%, at least 75%, at least 80%, at least 85%, at least 90%, at least 95%, at least 99%, at least 99.5 or greater, identical to the nucleotide sequence (e.g., a fragment of a nucleotide sequence) shown in SEQ ID NO:72 and to the nucleotide sequence (e.g., a fragment of a nucleotide sequence) shown in SEQ ID NO: 1. In one embodiment, the FMN1-ROS1 fusion comprises a nucleotide sequence containing at least 25, 50, 100, 150, 200, 500, 1000, 1500, 2000, 2500, 3000, or more nucleotides of the nucleotide sequence shown in SEQ ID NO:72 and a nucleotide sequence containing at least 25, 50, 100, 150, 200, 500, 1000, 1500, 2000, 2500, 3000, or more nucleotides of the nucleotide sequence shown in SEQ ID NO:11. In one embodiment, the FMN1-ROS1 fusion comprises a nucleotide sequence containing at least 25, 50, 100, 150, 200, 500, 1000, 1500, 2000, 2500, 3000, or more contiguous nucleotides of the nucleotide sequence shown in SEQ ID NO:72 and a nucleotide sequence containing at least 25, 50, 100, 150, 200, 500, 1000, 1500, 2000, 2500, 3000, or more nucleotides of the nucleotide sequence shown in SEQ ID NO: 11.

[0791] In another embodiment, the nucleic acid molecule includes a fusion, e.g., an in-frame fusion, of at least 1, 2, 3, 4, 5, 6, 7, 8, 9, 10, 11, 12, 13, 14, 15, 16, 17, 18, 19, 20, 21, 22, 23 or more exons of FMN1 or a fragment thereof (e.g., one or more of exons 1-23 of FMN1 or a fragment thereof), and at least 1, 2, 3, 4, 5, 6, 7, 8, 9 or more exons of ROS1 or a fragment thereof (e.g., one or more of exons 35-43 of ROS1 or a fragment thereof). In yet other embodiments, the nucleic acid molecule includes a fragment the nucleotide sequence shown in SEQ ID NO:72 and a fragment of the nucleotide sequence shown in SEQ ID NO:11 or a fragment of the fusion, or a sequence substantially identical thereto.

[0792] In one embodiment, the nucleic acid molecule is complementary to at least a portion of a nucleotide sequence disclosed herein, e.g., is capable of hybridizing under a stringency condition described herein to SEQ ID NO:72 and/or SEQ ID NO: 11, or a fragment thereof. In yet another embodiment, the nucleic acid molecule hybridizes to a nucleotide sequence that is complementary to at least a portion of a nucleotide sequence disclosed herein, e.g., is capable of hybridizing under a stringency condition to a nucleotide sequence complementary to SEQ ID NO:72 and/or SEQ ID NO: 11, or a fragment thereof. The nucleotide sequence of a cDNA encoding an exemplary 5′ FMN1-3′ ROS1 fusion is shown in at least exon 23 (e.g., exons 1-23) of SEQ ID NO:72 and at least exon 35 (e.g., exons 35-43) of SEQ ID NO: 11, and the predicted amino acid sequence is shown in the corresponding encoded exons of SEQ ID NO:73 and the corresponding encoded exons of SEQ ID NO: 12, respectively.

[0793] In an embodiment the FMN1-ROS1 nucleic acid molecule comprises sufficient FMN1 and sufficient ROS1 sequence such that the encoded 5′ FMN1-3′ ROS1 fusion has kinase activity, e.g., has elevated activity. In certain embodiments, the 5′ FMN1-3′ ROS1 fusion comprises exons 1-23 from FMN1 and exons 35-43 from ROS1. In certain embodiments, the FMN1-ROS1 fusion comprises at least 1, 2, 3, 4, 5, 6, 7, 8, 9, 10, 11, 12, 13, 14, 15, 16, 17, 18, 19, 20, 21, 22, 23 or more exons from FMN1 and at least at least 1, 2, 3, 4, 5, 6, 7, 8, or more exons of ROS1. In certain embodiments, the FMN1-ROS1 fusion comprises a fusion of exon 23 from FMN1 and exon 35 from ROS1. In another embodiment, the FMN1-ROS1 fusion comprises 1, 2, 3, 4, 5, 6, 7, 8, 9, 10, 11, 12, 13, 14, 15, 16, 17, 18, 19, 20, 21, 22, 23 or more exons of FMN1; and at least 1, 2, 3, 4, 5, 6, 7, 8, 9 or more exons of ROS1.

[0794] In one embodiment, the nucleic acid molecule includes a nucleotide sequence that has an in-frame fusion of intron 23 of FMN1 (e.g., NM_{—}000259) with intron 34 of ROS1 (e.g., NM_{—}002944). In another embodiment, the nucleic acid molecule includes a nucleotide sequence that includes a breakpoint. For example, the nucleic acid molecule includes a nucleotide sequence that includes the fusion junction between the FMN1 gene and the ROS1 gene, e.g., the breakpoint between intron 23 of FMN1 and intron 34 of ROS1. In other embodiments, the nucleic acid molecules includes a nucleotide sequence of one or more of nucleotide of chromosome 15 coupled to (e.g., directly or indirectly juxtaposed to) one or more of nucleotide of chromosome 6. In one embodiment, the nucleic acid molecule includes the nucleotide sequence of: chromosome 15 at one or more of a nucleotide plus or minus 10, 20, 30, 40 50, 60, 80, 100, 150 nucleotides and chromosome 6 at one or more of a nucleotide plus or minus 10, 20, 30, 40 50, 60, 80, 100, 150 nucleotides (corresponding to the breakpoint of a FMN1-ROS1 fusion), or a fragment thereof, or a sequence substantially identical thereto. In one embodiment, the nucleic acid molecule is complementary to at least a portion of a nucleotide sequence disclosed herein, e.g., is capable of hybridizing under a stringency condition described herein to SEQ ID NO:72 and/or SEQ ID NO: 11 or a fragment thereof. In yet other embodiments, the nucleic acid molecule hybridizes to a nucleotide sequence that is complementary to at least a portion of a nucleotide sequence disclosed herein, e.g., is capable of hybridizing under a stringency condition described herein to a nucleotide sequence complementary to SEQ ID NO:72 or SEQ ID NO: 11 or a fragment thereof.

[0795] In another embodiment, the FMN1-ROS1 fusion nucleic acid comprises at least 6, 12, 15, 20, 25, 50, 75, 100 or more nucleotides from exon 23 of FMN1 (e.g., from the nucleotide sequence of FMN1 preceding the fusion junction with ROS1, e.g., of the FMN1 sequence shown in SEQ ID NO:72), and at least 6, 12, 15, 20, 25, 50, 75, 100 or more nucleotides from exon 35 of ROS1 (e.g., from the nucleotide sequence of ROS1 following the fusion junction with FMN1, e.g., of the ROS1 sequence shown in SEQ ID NO:11).

[0796] In other embodiments, the nucleic acid molecule includes a nucleotide sequence encoding a FMN1-ROS1 fusion polypeptide that includes a fragment of a FMN1 gene and a fragment of a ROS1 gene. In one embodiment, the nucleotide sequence encodes a FMN1-ROS1 fusion polypeptide that includes e.g., a tyrosine kinase domain or a functional fragment thereof. In yet other embodiments, the nucleic acid molecule includes a nucleotide sequence encoding the amino acid sequence (e.g., a fragment of the amino acid sequence) shown in SEQ ID NO:73 and a nucleotide sequence encoding the amino acid sequence (e.g., a fragment of the amino acid sequence) shown in SEQ ID NO: 12, or a fragment of the fusion, or a sequence substantially identical thereto. In one embodiment, the encoded FMN1-ROS1 fusion polypeptide includes a tyrosine kinase domain or a functional fragment thereof.

[0797] In a related aspect, the invention features nucleic acid constructs that include the FMN1-ROS nucleic acid molecules described herein. In certain embodiments, the nucleic acid molecules are operatively linked to a native or a heterologous regulatory sequence. Also included are vectors and host cells that include the FMN1-ROS1 nucleic acid molecules described herein, e.g., vectors and host cells suitable for producing the nucleic acid molecules and polypeptides described herein.

[0798] In a related aspect, methods of producing the nucleic acid molecules and polypeptides described herein are also described.

[0799] In another aspect, the invention features nucleic acid molecules that reduce or inhibit the expression of a nucleic acid molecule that encodes a FMN1-ROS1 fusion described herein. Examples of such nucleic acid molecules include, for example, antisense molecules, ribozymes, RNAi, triple helix molecules that hybridize to a nucleic acid encoding FMN1-ROS1, or a transcription regulatory region of FMN1-ROS1, and blocks or reduces mRNA expression of FMN1-ROS.

### Nucleic Acid Detection and Capturing Reagents

[0800] The invention also features a nucleic acid molecule, e.g., nucleic acid fragment, suitable as probe, primer, bait or library member that includes, flanks, or hybridizes to the FMN1-ROS1 fusions described herein. Such nucleic acid molecules are useful for identifying, or are otherwise based on, the FMN1-ROS1 fusions described herein. In certain embodiments, the probe, primer or bait molecule is an oligonucleotide that allows capture, detection or isolation of a FMN1-ROS1 fusion nucleic acid molecule described herein. The oligonucleotide can comprise a nucleotide sequence substantially complementary to a fragment of the FMN1-ROS1 fusion nucleic acid molecules described herein. The sequence identity between the nucleic acid fragment, e.g., the oligonucleotide, and the target FMN1-ROS1 sequence need not be exact, so long as the sequences are sufficiently complementary to allow the capture, detection or isolation of the target sequence. In one embodiment, the nucleic acid fragment is a probe or primer that includes an oligonucleotide between about 5 and 25, e.g., between 10 and 20, or 10 and 15 nucleotides in length. In other embodiments, the nucleic acid fragment is a bait that includes an oligonucleotide between about 100 to 300 nucleotides, 130 and 230 nucleotides, or 150 and 200 nucleotides, in length.

[0801] In one embodiment, the nucleic acid fragment can be used to identify or capture. e.g., by hybridization, a FMN1-ROS1 fusion. For example, the nucleic acid fragment can be a probe, a primer, or a bait, for use in identifying or capturing, e.g., by hybridization, a FMN1-ROS1 fusion described herein. In one embodiment, the nucleic acid fragment can be useful for identifying or capturing a FMN1-ROS1 breakpoint, e.g., the nucleotide sequence of: chromosome 15 at nucleotide plus or minus 10, 20, 30, 40, 50, 60, 80, 100, 150 nucleotides and chromosome 6 at nucleotide plus or minus 10, 20, 30, 40 50, 60, 80, 100, 150 nucleotides.

[0802] In one embodiment, the nucleic acid fragment hybridizes to a nucleotide sequence within a chromosomal rearrangement that creates an in-frame fusion of intron 23 of FMN1 with intron 34 of ROS1. In one embodiment, the nucleic acid fragment hybridizes to a nucleotide sequence in the region In other embodiments, the nucleic acid molecules includes a nucleotide sequence in the region of a nucleotide sequence of chromosome 15 coupled to (e.g., juxtaposed to) nucleotides in the region of a nucleotide sequence Y of chromosome 6. In one embodiment, the nucleic acid fragment hybridizes to a nucleotide sequence that includes a breakpoint, e.g., the nucleotide sequence of: chromosome 15 at nucleotide plus or minus 10, 20, 30, 40 50, 60, 80, 100, 150 or more nucleotides and chromosome 6 at nucleotide plus or minus 10, 20, 30, 40 50, 60, 80, 100, 150 or more nucleotides. For example, the nucleic acid fragment can hybridize to a nucleotide sequence that includes the fusion junction between the FMN11 gene and the ROS1 gene, e.g., a nucleotide sequence that includes a portion of a nucleotide sequence within intron 23 of a FMN1 gene and intron 34 of a ROS1 gene.

[0803] In another embodiment, the nucleic acid fragment hybridizes to a nucleotide sequence that comprises at least 6, 12, 15, 20, 25, 50, 75, 100, 150 or more nucleotides from exon 23 of FMN1 (e.g., from the nucleotide sequence of FMN1 preceding the fusion junction with ROS1, e.g., of the FMN1 sequence shown in SEQ ID NO:72), and at least 6, 12, 15, 20, 25, 50, 75, 100, 150 or more nucleotides from exon 35 of ROS1 (e.g., from the nucleotide sequence of ROS1 following the fusion junction with FMN1, e.g., of the ROS1 sequence shown in SEQ ID NO: 11).

[0804] The probes or primers described herein can be used, for example, for FISH detection or PCR amplification. In one exemplary embodiment where detection is based on PCR, amplification of the FMN1-ROS1 fusion junction fusion junction can be performed using a primer or a primer pair, e.g., for amplifying a sequence flanking the fusion junctions described herein, e.g., the mutations or the junction of a chromosomal rearrangement described herein, e.g., FMN1-ROS1.

[0805] In one embodiment, a pair of isolated oligonucleotide primers can amplify a region containing or adjacent to a position in the FMN1-ROS1 fusion. For example, forward primers can be designed to hybridize to a nucleotide sequence within FMN1 genomic or mRNA sequence (e.g., a nucleotide sequence within exon 23 of FMN1 of SEQ ID NO:72), and the reverse primers can be designed to hybridize to a nucleotide sequence of ROS1 (e.g., a nucleotide sequence within exon 35 of ROS1, of SEQ ID NO: 11).

[0806] In another embodiment, the nucleic acid fragments can be used to identify, e.g., by hybridization, a FMN1-ROS1 fusion. In one embodiment, the nucleic acid fragment hybridizes to a nucleotide sequence that includes a fusion junction between the FMN1 transcript and the ROS1 transcript.

[0807] In other embodiments, the nucleic acid fragment includes a bait that comprises a nucleotide sequence that hybridizes to a FMN1-ROS1 fusion nucleic acid molecule described herein, and thereby allows the capture or isolation said nucleic acid molecule. In one embodiment, a bait is suitable for solution phase hybridization. In other embodiments, a bait includes a binding entity, e.g., an affinity tag, that allows capture and separation, e.g., by binding to a binding entity, of a hybrid formed by a bait and a nucleic acid hybridized to the bait.

[0808] In other embodiments, the nucleic acid fragment includes a library member comprising a FMN1-ROS1 nucleic acid molecule described herein. In one embodiment, the library member includes a rearrangement that results in a FMN1-ROS1 fusion described herein.

[0809] The nucleic acid fragment can be detectably labeled with, e.g., a radiolabel, a fluorescent label, a bioluminescent label, a chemiluminescent label, an enzyme label, a binding pair label, or can include an affinity tag; a tag, or identifier (e.g., an adaptor, barcode or other sequence identifier).

### FMN1-ROS1 Fusion Polypeptides

[0810] In another embodiment, the FMN1-ROS1 fusion comprises an amino acid sequence (e.g., a fragment of the amino acid sequence) shown in SEQ ID NO:73 and an amino acid sequence (e.g., a fragment of the amino acid sequence) shown in SEQ ID NO: 12, or a fragment of the fusion. In one embodiment, the FMN1-ROS1 fusion comprises an amino acid sequence substantially identical to the amino acid sequence (e.g., a fragment of the amino acid sequence) shown in SEQ ID NO:73 and the amino acid sequence (e.g., a fragment of the amino acid sequence) shown in SEQ ID NO:12, or a fragment thereof. In one embodiment, the FMN1-ROS1 fusion comprises an amino acid sequence at least 70%, at least 75%, at least 80%, at least 85%, at least 90%, at least 95%, at least 99%, at least 99.5 or greater, identical to the amino acid sequence (e.g., a fragment of the amino acid sequence) shown in SEQ ID NO:73 and the amino acid sequence (e.g., a fragment of the amino acid sequence) shown in SEQ ID NO:12. In one embodiment, the FMN1-ROS1 fusion comprises a sequence containing at least 10, 20, 50, 100, 500, 600, 700, 800, 900, 1000, or more amino acids of the amino acid sequence shown in SEQ ID NO:73 and SEQ ID NO: 12. In one embodiment, the FMN1-ROS1 fusion comprises an amino acid sequence containing at least 5, 10, 20, 50, 100, 500, 600, 700, 800, 900, 1000, or more contiguous amino acids of the amino acid sequence shown in SEQ ID NO:73 and at least 5, 10, 20, 50, 100, 500, 600, 700, 800, 900, 1000, or more contiguous amino acids of the amino acid sequence shown in SEQ ID NO:12. In one embodiment, the 5′ FMN1-3′ ROS1 fusion polypeptide includes a receptor tyrosine kinase domain or a functional fragment thereof. In an embodiment, the 5′FMN1-3′ROS1 fusion polypeptide comprises sufficient ROS1 and sufficient FMN1 sequence such that it has kinase activity, e.g., has elevated activity.

[0811] In another aspect, the invention features a FMN1-ROS1 fusion polypeptide (e.g., a purified FMN1-ROS1 fusion polypeptide), a biologically active or antigenic fragment thereof, as well as reagents (e.g., antibody molecules that bind to a FMN1-ROS1 fusion polypeptide), methods for modulating a FMN1-ROS1 polypeptide activity and detection of a FMN1-ROS1 polypeptide.

[0812] In one embodiment, the FMN1-ROS1 fusion polypeptide has at least one biological activity. In one embodiment, at least one biological activity of the FMN1-ROS1 fusion polypeptide is reduced or inhibited by an anti-cancer drug, e.g., a FMN1 inhibitor, a ROS1 inhibitor. In one embodiment, at least one biological activity of the FMN1-ROS1 fusion polypeptide is reduced or inhibited by a ROS1 inhibitor. In one embodiment, at least one biological activity of the FMN1-ROS1 fusion polypeptide is reduced or inhibited by a FMN1 inhibitor. In one embodiment, at least one biological activity of the FMN1-ROS1 fusion polypeptide is reduced or inhibited by a ROS1 inhibitor. e.g., Ganetespib; Crizotinib; TAE684, a dual ALK and ROS1 inhibitor.

[0813] In yet other embodiments, the FMN1-ROS1 fusion polypeptide is encoded by a nucleic acid molecule described herein. In one embodiment, the FMN1-ROS1 fusion polypeptide is encoded by an in-frame fusion of intron 23 of FMN1 with intron 34 of ROS1 (e.g., a sequence on chromosome 15 and a sequence on chromosome 6). In another embodiment, the FMN1-ROS1 fusion polypeptide includes an amino acid sequence encoded by a nucleotide sequence comprising a fusion junction between the FMN1 transcript and the ROS1 transcript.

[0814] In certain embodiments, the FMN1-ROS1 fusion polypeptide comprises one or more of encoded exons 1-23 from FMN1 and one or more of encoded exons 35-43 of ROS1. In certain embodiments, the FMN1-ROS1 fusion polypeptide comprises at least 1, 2, 3, 4, 5, 6, 7, 8, 9, 10, 11, 12, 13, 14, 15, 16, 17, 18, 19, 20, 21, 22, 23 or more encoded exons of FMN1 and at least at least 1, 2, 3, 4, 5, 6, 7, 8, 9 or more encoded exons of ROS1. In certain embodiments, the FMN1-ROS1 fusion polypeptide comprises a fusion of encoded exon 23 from FMN1 and encoded exon 35 from ROS1 (or a fragment thereof). In other embodiments, the fusion comprises at least 1, 2, 3, 4, 5, 6, 7, 8, 9, 10, 11, 12, 13, 14, 15, 16, 17, 18, 19, 20, 21, 22, 23 or more encoded exons of FMN1; and at least 1, 2, 3, 4, 5, 6, 7, 8, 9 or more encoded exons of ROS1. In certain embodiments, the FMN1-ROS1 fusion polypeptide comprises encoded exons 1-23 from FMN1 and exons 35-43 of ROS1. In certain embodiments, the 5′ FMN1-3′ ROS1 fusion polypeptide comprises a fusion junction of the sequence of exon 23 from FMN1 and the sequence of exon 35 from ROS1.

[0815] In certain embodiments, the FMN1-ROS1 fusion comprises the amino acid sequence corresponding to exon 23 or a fragment thereof from FMN1, and the amino acid sequence corresponding to exon 35 or a fragment thereof from ROS1 (e.g., as shown in SEQ ID NO:73 and SEQ ID NO:12). In one embodiment, the FMN1-ROS1 fusion comprises at least 5, 10, 15, 20 or more amino acids from exon 23 of FMN1 (e.g., from the amino acid sequence of FMN1 preceding the fusion junction with ROS1, e.g., of the FMN1 sequence shown in SEQ ID NO:73), and at least 5, 10, 15, 20 or more amino acids from exon 35 of ROS1 (e.g., from the amino acid sequence of ROS1 following the fusion junction with FMN1, e.g., of the ROS1 sequence shown in SEQ ID NO: 12).

[0816] In one embodiment, the FMN1-ROS1 fusion polypeptide includes a tyrosine kinase domain or a functional fragment thereof. In a related aspect, the invention features FMN1-ROS1 fusion polypeptide or fragments operatively linked to heterologous polypeptides to form fusion proteins.

[0817] In another embodiment, the FMN1-ROS1 fusion polypeptide or fragment is a peptide, e.g., an immunogenic peptide or protein containing a fusion junction described herein. Such immunogenic peptides or proteins can be used to raise antibodies specific to the fusion protein. In other embodiments, such immunogenic peptides or proteins can be used for vaccine preparation. The vaccine preparation can include other components, e.g., an adjuvant.

[0818] In another aspect, the invention features antibody molecules that bind to a FMN1-ROS1 fusion polypeptide or fragment described herein. In embodiments, the antibody can distinguish wild type ROS1 (or FMN1) from FMN1-ROS1.

### Detection Reagents and Detection of Mutations

[0819] In another aspect, the invention features a detection reagent, e.g., a purified or an isolated preparation thereof. Detection reagents can distinguish a nucleic acid, or protein sequence, having a breakpoint, e.g., a FMN1-ROS1 breakpoint; from a reference sequence. In one embodiment, the detection reagent detects (e.g., specifically detects) a FMN1-ROS1 fusion nucleic acid or a polypeptide, e.g., distinguishes a wild type ROS1 or another ROS1 fusion (or FMN1) from a FMN1-ROS1 nucleic acid (e.g., as described herein in SEQ ID NO:72 and SEQ ID NO: 11); or a FMN1-ROS1 polypeptide (e.g., as described herein in SEQ ID NO:73 and SEQ ID NO:12).

[0820] Detection reagents, e.g., nucleic acid-based detection reagents, can be used to identify mutations in a target nucleic acid, e.g., DNA, e.g., genomic DNA or cDNA, or RNA, e.g., in a sample, e.g., a sample of nucleic acid derived from a neoplastic or tumor cell, e.g., a melanocytic neoplasm, melanoma or metastatic cell. Detection reagents, e.g., antibody-based detection reagents, can be used to identify mutations in a target protein, e.g., in a sample, e.g., a sample of protein derived from, or produced by, a neoplastic or tumor cell, e.g., a melanocytic neoplasm, melanoma or metastatic cell.

### Method of Treatment

[0821] In a related aspect, a method of inhibiting, reducing, or treating a hyperproliferative disorder, e.g., a neoplasm (including benign, pre-malignant or malignant (e.g., a cancer), in a subject is provided. The method includes administering to the subject a preselected therapeutic agent, e.g., an anti-cancer agent (e.g., a kinase inhibitor), as a single agent, or in combination, in an amount sufficient to reduce, inhibit or treat the activity or expression of FMN1-ROS1 (e.g., a FMN1-ROS1 fusion described herein), thereby inhibiting, reducing, or treating the hyperproliferative disorder in the subject.

[0822] In one embodiment, the subject treated has a FMN1-ROS1 fusion; e.g., the subject has a tumor or cancer harboring a FMN1-ROS1 fusion. In other embodiments, the subject has been previously identified as having a FMN1-ROS1 fusion. In yet other embodiments, the subject has been previously identified as being likely or unlikely to respond to treatment with a protein kinase inhibitor, e.g., a subject that has previously participated in a clinical trial. In other embodiments, the subject has been previously identified as being likely or unlikely to respond to treatment with a protein kinase inhibitor, based on the presence of the FMN1-ROS1 fusion. In one embodiment, the subject is a mammal, e.g., a human. In one embodiment, the subject has, or is at risk of having a cancer at any stage of disease. In other embodiments, the subject is a patient, e.g., a cancer patient.

[0823] In certain embodiments, the neoplasm or neoplastic cell is a benign, pre-malignant, malignant (cancer) or metastasis. In certain embodiments, the cancer is a solid tumor, a soft tissue tumor, or a metastatic lesion.

[0824] In one embodiment, the neoplasm or neoplastic cell is a benign, pre-malignant, malignant (cancer) or metastasis. In certain embodiments, the cancer is a solid tumor, a soft tissue tumor, or a metastatic lesion. In one embodiment, the cancer is a carcinoma. In one embodiment, the cancer is an adenocarcinoma. In an embodiment, the cancer is a lung adenocarcinoma. In one embodiment, the cancer is chosen from a lung cancer, a pancreatic cancer, melanoma, a colorectal cancer, an esophageal-gastric cancer, a thyroid cancer, or an adenocarcinoma. In one embodiment, the cancer is a lung adenocarcinoma. In other embodiment, the lung cancer is chosen from one or more of the following: non-small cell lung cancer (NSCLC), small cell lung cancer (SCLC), squamous cell carcinoma (SCC), adenocarcinoma of the lung, bronchogenic carcinoma, or a combination thereof. In one embodiment, the lung cancer is NSCLC or SCC.

[0825] In one embodiment, the anti-cancer agent is a ROS1 inhibitor. In one embodiment, the anti-cancer agent is a FMN1 inhibitor. In one embodiment, the anti-cancer agent is a kinase inhibitor. In one embodiment, the anti-cancer agent is a ROS1 inhibitor, e.g., Ganetespib; Crizotinib; TAE684; a dual ALK and ROS1 inhibitor.

### Nucleic Acid Molecules

[0826] In one aspect, the invention features, an isolated nucleic acid molecule, or an isolated preparation of nucleic acid molecules, that includes a genetic alteration or mutation, e.g., a rearrangement, disclosed herein, e.g., in this section entitled Nucleic Acid Molecules, or in FIG. 1A. 1B or 1C. Such nucleic acid molecules or preparations thereof can be used to detect, e.g., sequence, a genetic alteration or mutation disclosed herein and to characterize a sample in which they are contained. The isolated nucleic acid can be a genomic or a transcribed sequence, e.g., cDNA or mRNA sequence.

[0827] In another aspect, the invention features, a nucleic acid molecule (e.g., an isolated or purified) nucleic acid molecule that includes a fragment of a first gene, and a fragment of a second gene, the latter typically a gene that encodes a kinase. In embodiments, the first gene is a gene from FIG. 1A, 1B or 1C and the second gene is a gene, e.g., a kinase from FIG. 1A, 1B or 1C. In an embodiment the fusion protein has the fusion partners of a fusion protein described in FIG. 1A, 1B or 1C.

[0828] The isolated nucleic acid molecule can comprise the entire sequence of the first fragment and the entire sequence of the second fragment, e.g., as shown in FIG. 1A, 1B or 1C.

[0829] In embodiments the isolated nucleic acid is a genomic nucleic acid molecule comprises sequence encoding the entire sequence, e.g., from the control region or beginning of the open reading frame, through the breakpoint, which may be in an intron or an exon, of the first gene, fused to the a sequence for the second gene which begins at its breakpoint and extends to the end of the gene, e.g., through the end of the open reading frame of that gene. In other embodiments the isolated nucleic acid will include the fusion junction but only a portion of the fragment of the first or second gene present in the rearrangement.

[0830] In embodiments the isolated nucleic acid is a transcribed nucleic acid, e.g., a cDNA or mRNA, and comprises sequence encoding the entire sequence, e.g., from the beginning of the mRNA through the breakpoint of the first gene fused to the a sequence for the second gene which begins at its breakpoint and extends to the end of the mRNA of the second gene. In other embodiments the isolated nucleic acid will include the fusion junction but only a portion of the fragment of the first or second gene present in the rearrangement. In embodiments a transcribed nucleic acid will have one or more exon from the first gene fused, in frame, to one or more exons of the second or “host” gene. In embodiments a transcribed nucleic acid will have comprise the fusion of the C terminus of the C terminal exon of the first gene fragment with the N terminus of the N terminal exon of the second gene.

[0831] In embodiments the fusion puts the kinase activity of the second gene under the control of the first gene.

[0832] In embodiments the isolated nucleic acid, e.g., a genomic or transcribed nucleic acid, e.g., a cDNA or RNA, comprises the fusion junction, e.g., a fusion junction from FIG. 1A, 1B or 1C, and is at least 10, 20, 30, 40, 50, 60, 70, 80, 100, 125, 150, 200, 250, 300, 350, or 400 nucleotides in length, but optionally less than 1,000, 1,500, or 2,000 nucleotides in length. In embodiments, the isolated nucleic acid, e.g., a genomic or transcribed nucleic acid, e.g., a cDNA or RNA, comprises the fusion junction, e.g., a fusion junction from FIG. 1A, 1B or 1C, and is between 10 and 2,000, 10 and 1,500, 10 and 1,000, 10 and 500, 10 and 400, 10 and 300, 10 and 200, 10 and 100, 20 and 2,000, 20 and 1,500, 20 and 1,000, 20 and 500, 20 and 400, 20 and 300, 20 and 200, 20 and 100, 30 and 2,000, 30 and 1,500, 30 and 1,000, 30 and 500, 30 and 400, 30 and 300, 30 and 200, 30 and 100 nucleotides in length.

[0833] In one embodiment, the isolated nucleic acid, e.g., a transcribed nucleic acid, e.g., a cDNA or RNA, comprises a fusion, e.g., an in-frame fusion, from FIG. 1B or a fusion transcribed from a genomic fusion from FIG. 1A.

[0834] In an embodiment, the isolated nucleic acid, e.g., a transcribed nucleic acid, e.g., a cDNA or RNA, comprises a fusion, e.g., an in-frame fusion, of the 3′ terminus of an exon of a fragment of the first gene of FIG. 1B to the 5′ terminus of an exon of a fragment of the second gene of FIG. 1B. In an embodiment the fusion is between the exons listed in FIG. 1B. In embodiments, fusion is not be between the specific exons found in FIG. 1B but is between other exons of the first gene to other exons of the second gene of a fusion from FIG. 1B.

[0835] In an embodiment, the isolated nucleic acid, e.g., a transcribed nucleic acid, e.g., a cDNA or RNA, comprises a fusion, e.g., an in-frame fusion, of the C terminal exon of a fragment of first gene of FIG. 1B to the N terminus of an exon a fragment of the second gene other than the second gene exon shown in FIG. 1B. By way of example, an exon, e.g., exon 16 of CEP89 is fused to an exon, of BRAF other than the exon listed in FIG. X1, e.g., it is fused to an exon other than exon 9.

[0836] In an embodiment, the isolated nucleic acid, e.g., a transcribed nucleic acid, e.g., a cDNA or RNA, comprises a fusion, e.g., an in-frame fusion, of the N terminal exon of a fragment of the second gene of FIG. 1B to the C terminus of an exon of a fragment of the first gene other than the first-gene exon shown in FIG. 1B. By way of example, exon 9 of BRAF is fused to an exon of CEP89 other than the exon listed in FIG. 1B (exon 16)

[0837] In an embodiment of the isolated nucleic acid, e.g., a genomic or transcribed nucleic acid, e.g., a cDNA or RNA, the second gene is a kinase and sufficient exonic sequence is present to confer kinase activity. In an embodiment of the isolated nucleic acid, e.g., a genomic or transcribed nucleic acid, e.g., a cDNA or mRNA, sufficient sequence of the first gene is present to allow expression of kinase activity of the fusion partner.

[0838] In an embodiment of the isolated nucleic acid, e.g., a transcribed nucleic acid, e.g., a cDNA or RNA, comprises a fusion junction between:

[0839] CLIP1 and ROS1;

[0840] PPFIBP1 and ROS1;

[0841] TPM3 and ROS1;

[0842] ZCCHC8 and ROS1;

[0843] MYO5A and ROS1;

[0844] PWWP2A and ROS1;

[0845] HLA-A and ROS1;

[0846] ERC1 and ROS1;

[0847] TPM3 and ALK;

[0848] GOLGA5 and RET;

[0849] CEP89 and BRAF;

[0850] KIF5B and RET;

[0851] TP53 and NTRK1;

[0852] KIAA1598 and ROS1:

[0853] DCTN1 and ALK;

[0854] LSM14A and BRAF; or

[0855] LMNA and NTRK1.

[0856] wherein sufficient exonic sequence from the kinase is present to confer kinase activity and sufficient sequence of the other gene is present to allow expression of kinase activity of the fusion partner, in some embodiments rendering the kinase portion constitutively active and in any event enhancing its activity compared to the same kinase activity of either wild type gene.

[0857] Also included are genomic fusion that can be transcribed to provide a transcribed nucleic acid, e.g., a cDNA or RNA, described herein.

[0858] In one embodiment, the isolated nucleic acid, e.g., a genomic nucleic acid, comprises a fusion of a first and second gene from FIG. 1A.

[0859] In embodiments, the fusion is between genes that are fusion partners in a fusion described in FIG. 1A or 1B. In an embodiment sufficient sequence from the second gene is present to confer kinase activity on an encoded protein and sufficient sequence is present from the first gene to provide for expression of the kinase activity of the fusion partner in an encoded protein.

[0860] In an embodiment, the isolated nucleic acid, e.g., a genomic sequence, comprises a fusion of the 3′ terminus of a fragment of a first gene to the 5′ terminus of a fragment of a second gene, shown in FIG. 1A. In an embodiment, the 3′ terminus of the fragment of the first gene is within 10, 20, 30, 40, 50 60, 70, 80, 90, or 100 nucleotides (in either direction) of the 3-terminus provided in FIG. 1A for the first gene. In an embodiment, the 5′ terminus of the fragment of the second gene is within 10, 20, 30, 40, 50 60, 70, 80, 90, or 100 nucleotides (in either direction) of the 5′ terminus provided in FIG. 1 for the second gene. By way of example, for the CEP89-BRAF fusion from a cancer sample, the 3′ terminus can be a nucleotide sequence of chr19, +/−N nucleotides and the 5′ terminus is a nucleotide sequence of chr7, wherein N, independently is 10, 20, 30, 40, 50, 60, 70, 80, 90, or 100 nucleotides. In embodiments, N is 50 nucleotides.

[0861] The fusion need not be between the specific exons found in FIG. 1A or 1B but can be fusions of other exons of the first gene to other exons of the second gene, provided that sufficient sequence from the second gene is present to confer kinase activity on an encoded protein and sufficient sequence is present from the first gene to provide for expression of the kinase activity of the fusion partner in an encoded protein.

[0862] In another aspect, methods of producing the nucleic acid molecules and polypeptides described herein are also described.

### Detection Reagents and Detection of Mutations

[0863] In another aspect, the invention features a detection reagent, e.g., a purified or an isolated preparation thereof. Detection reagents can distinguish a nucleic acid, e.g., a genomic or transcribed nucleic acid, e.g., a cDNA or RNA, or protein sequence, having a breakpoint or fusion junction described herein, e.g., in FIG. 1A or 1B, or in the section herein entitled Nucleic Acid Molecules, from a reference sequence, e.g., a sequence not having the breakpoint or fusion junction.

[0864] In one embodiment, the detection reagent detects (e.g., specifically detects) a fusion nucleic acid or a polypeptide, e.g., distinguishes a wild type or another fusion from a fusion described herein, e.g., in FIG. 1A or 1B or in the section herein entitled Nucleic Acid Molecules.

[0865] Detection reagents, e.g., nucleic acid-based detection reagents, can be used to identify mutations, e.g., rearrangements or fusion junctions described herein, e.g., in FIG. 1A or 1B or in the section herein entitled Nucleic Acid Molecules, in a target nucleic acid, e.g., DNA, e.g., genomic DNA or a transcribed nucleic acid, cDNA, or RNA, e.g., in a sample, e.g., a sample of nucleic acid derived from a neoplastic or tumor cell, e.g., a primary or metastatic cell. In an embodiment a rearrangement or fusion junction described in FIG. 1A or 1B or in the section herein entitled Nucleic Acid Molecules, is detected in a sample of the corresponding cancer listed in FIG. 1A. Detection reagents, e.g., antibody-based detection reagents, can be used to identify, mutations described herein, e.g., in FIG. 1A or 1B or in the section herein entitled Nucleic Acid Molecules, in a target protein, e.g., in a sample, e.g., a sample of protein derived from, or produced by, a primary or metastatic cell.

### Nucleic Acid-Based Detection Reagents

[0866] In an embodiment, the detection reagent comprises a nucleic acid molecule, e.g., a DNA, RNA or mixed DNA/RNA molecule, comprising sequence which is complementary with a nucleic acid sequence on a target nucleic acid, e.g., a nucleic acid that includes the rearrangement or fusion junction, (the sequence on the target nucleic acid that is bound by the detection reagent is referred to herein as the “detection reagent binding site” and the portion of the detection reagent that corresponds to the detection reagent binding site is referred to as the “target binding site”). In an embodiment, the detection reagent binding site is disposed in relationship to the interrogation position, e.g., one or both nucleotides flanking the fusion junction, such that binding (or in embodiments, lack of binding) of the detection reagent to the detection reagent binding site, or the proximity of binding to probes of a detection reagent to their detection binding sites, allows differentiation of mutant and reference sequences for a mutant described herein (e.g., a rearrangement having a breakpoint described herein, e.g., in FIG. 1A or 1B or in the section herein entitled Nucleic Acid Molecules, from a reference sequence. The detection reagent can be modified, e.g., with a label or other moiety, e.g., a moiety that allows capture.

[0867] In embodiments, a mutation described herein, e.g., in FIG. 1A or 1B or in the section herein entitled Nucleic Acid Molecules, is distinguished from reference by binding or lack of binding of a detection reagent.

[0868] In embodiments, e.g., with proximity based probes, e.g., FISH probes, a mutation described herein, e.g., in FIG. 1A or 1B or in the section herein entitled Nucleic Acid Molecules, and a reference are distinguished by the proximity of the binding of two probes of the detection reagent. E.g., a genomic rearrangement that alters the distance between two binding sites can be detected with proximity based probes, e.g., FISH probes.

[0869] In an embodiment, the detection reagent comprises a nucleic acid molecule, e.g., a DNA, RNA or mixed DNA/RNA molecule, which, e.g., in its target binding site, includes the interrogation position, e.g., one or more of the nucleotides that flank a fusion junction, and which can distinguish (e.g., by affinity of binding of the detection reagent to a target nucleic acid, e.g., a genomic or transcribed nucleic acid, e.g., a cDNA or RNA, or the ability for a reaction, e.g., a ligation or extension reaction with the detection reagent) between a mutation, e.g., a translocation described herein, and a reference sequence. In embodiments, the interrogation position, e.g., one or both nucleotides flanking the fusion junction can correspond to a terminal, e.g., to a 3′ or 5′ terminal nucleotide, a nucleotide immediately adjacent to a 3′ or 5′ terminal nucleotide, or to another internal nucleotide, of the detection reagent or target binding site.

[0870] In embodiments, the difference in the affinity of the detection reagent for a target nucleic acid, e.g., a genomic or transcribed nucleic acid, e.g., a cDNA or RNA, comprising the mutant, e.g., a rearrangement or fusion junction, described in FIG. 1A or 1B or in the section herein entitled Nucleic Acid Molecules, and that for a target nucleic acid comprising the reference sequence allows determination of the presence or absence of the mutation (or reference) sequence. Typically, such detection reagents, under assay conditions, will exhibit substantially higher levels of binding only to the mutant or only to the reference sequence.

[0871] In embodiments, binding allows (or inhibits) a subsequent reaction, e.g., a subsequent reaction involving the detection reagent or the target nucleic acid. E.g., binding can allow ligation, or the addition of one or more nucleotides to a nucleic acid, e.g., the detection reagent, e.g., by DNA polymerase, which can be detected and used to distinguish mutant from reference. In embodiments, the interrogation position, e.g., one or both nucleotides flanking the fusion junction is located at the terminus, or sufficiently close to the terminus, of the detection reagent or its target binding site, such that hybridization, or a chemical reaction, e.g., the addition of one or more nucleotides to the detection reagent, e.g., by DNA polymerase, only occurs, or occurs at a substantially higher rate, when there is a perfect match between the detection reagent and the target nucleic acid at the interrogation position, e.g., one or both nucleotides flanking the fusion junction or at a nucleotide position within 1, 2, or 3 nucleotides of the interrogation position, e.g., one or both nucleotides flanking the fusion junction.

[0872] In an embodiment, the detection reagent comprises a nucleic acid, e.g., a DNA, RNA or mixed DNA/RNA molecule wherein the molecule, or its target binding site, is adjacent (or flanks), e.g., directly adjacent, to the interrogation position, e.g., one or more of the nucleotides that flank a fusion junction, and which can distinguish between a mutation, e.g., a mutant, e.g., a rearrangement or fusion junction, described in FIG. 1A or 1B or in the section herein entitled Nucleic Acid Molecules, and a reference sequence, in a target nucleic acid, e.g., a genomic or transcribed nucleic acid, e.g., a cDNA or RNA.

[0873] In embodiments, the detection reagent binding site is adjacent to the interrogation position, e.g., one or both nucleotides flanking the fusion junction, e.g., the 5′ or 3′ terminal nucleotide of the detection reagent, or its target binding site, is adjacent, e.g., between 0 (directly adjacent) and 1,000, 500, 400, 200, 100, 50, 10, 5, 4, 3, 2, or 1 nucleotides from the interrogation position, e.g., one or both nucleotides flanking the fusion junction. In embodiments, the outcome of a reaction will vary with the identity of the nucleotide at the interrogation position, e.g., one or both nucleotides flanking the fusion junction, allowing one to distinguish between mutant and reference sequences. E.g., in the presence of a first nucleotide at the interrogation position, e.g., one or both nucleotides flanking the fusion junction, a first reaction will be favored over a second reaction. E.g., in a ligation or primer extension reaction, the product will differ, e.g., in charge, sequence, size, or susceptibility to a further reaction (e.g., restriction cleavage) depending on the identity of the nucleotide at the interrogation position, e.g., one or both nucleotides flanking the fusion junction. In embodiments the detection reagent comprises a set of reagents, for example paired molecules (e.g., forward and reverse primers), allowing for amplification, e.g., by PCR amplification, of a duplex containing the interrogation position, e.g., one or both nucleotides flanking the fusion junction. In such embodiments, the presence of the mutation can be determined by a difference in the property of the amplification product, e.g., size, sequence, charge, or susceptibility to a reaction, resulting from a sequence comprising the interrogation position, e.g., one or both nucleotides flanking the fusion junction, and a corresponding sequence having a reference nucleotide at the interrogation position, e.g., one or both nucleotides flanking the fusion junctions. In embodiments, the presence or absence of a characteristic amplification product is indicative of the identity of the nucleotide at the interrogation site and thus allows detection of the mutation.

[0874] In embodiments, the detection reagent, or its target binding site, is directly adjacent to the interrogation position, e.g., one or both nucleotides flanking the fusion junction, e.g., the 5′ or 3′ terminal nucleotide of the detection reagent is directly adjacent to the interrogation position, e.g., one or both nucleotides flanking the fusion junction. In embodiments, the identity of the nucleotide at the interrogation position, e.g., one or both nucleotides flanking the fusion junction, will determine the nature of a reaction, e.g., a reaction involving the detection reagent, e.g., the modification of one end of the detection reagent. E.g., in the presence of a first nucleotide at the interrogation position, e.g., one or both nucleotides flanking the fusion junction, a first reaction will be favored over a second reaction. By way of example, the presence of a first nucleotide at the interrogation position, e.g., one or both nucleotides flanking the fusion junction, e.g., a nucleotide associated with a mutation, can promote a first reaction, e.g., the addition of a complementary nucleotide to the detection reagent. By way of example, the presence of an A at the interrogation position, e.g., one or both nucleotides flanking the fusion junction, will cause the incorporation of a T, having, e.g., a first colorimetric label, while the presence of a G and the interrogation position, e.g., one or both nucleotides flanking the fusion junction, will cause the incorporation for a C, having, e.g., a second colorimetric label. In an embodiment, the presence of a first nucleotide at the nucleotide will result in ligation of the detection reagent to a second nucleic acid. E.g., a third nucleic acid can be hybridized to the target nucleic acid sufficiently close to the interrogation site that if the third nucleic acid has an exact match at the interrogation site it will be ligated to the detection reagent. Detection of the ligation product, or its absence, is indicative of the identity of the nucleotide at the interrogation site and thus allows detection of the mutation.

[0875] A variety of readouts can be employed. E.g., binding of the detection reagent to the mutant or reference sequence can be followed by a moiety, e.g., a label, associated with the detection reagent, e.g., a radioactive or enzymatic label. In embodiments the label comprises a quenching agent and a signaling agent and hybridization results in altering the distance between those two elements, e.g., increasing the distance and un-quenching the signaling agent. In embodiments, the detection reagent can include a moiety that allows separation from other components of a reaction mixture. In embodiments, binding allows cleavage of the bound detection reagent, e.g., by an enzyme, e.g., by the nuclease activity of the DNA polymerase or by a restriction enzyme. The cleavage can be detected by the appearance or disappearance of a nucleic acid or by the separation of a quenching agent and a signaling agent associated with the detection reagent. In embodiments, binding protects, or renders the target susceptible, to further chemical reaction, e.g., labeling or degradation, e.g., by restriction enzymes. In embodiments binding with the detection reagent allows capture separation or physical manipulation of the target nucleic acid to thereby allow for identification. In embodiments binding can result in a detect localization of the detection reagent or target, e.g., binding could capture the target nucleic acid or displace a third nucleic acid. Binding can allow for determination of the presence of mutant or reference sequences with FISH, particularly in the case of rearrangements. Binding can allow for the extension or other size change in a component, e.g., the detection reagent, allowing distinction between mutant and reference sequences. Binding can allow for the production, e.g., by PCR, of an amplicon that distinguishes mutant from reference sequence.

[0876] In an embodiment the detection reagent, or the target binding site, is between 5 and 2000, 5 and 1000, 5 and 500, 5 and 300, 5 and 250, 5 and 200, 5 and 150, 5 and 100, 5 and 50, 5 and 25, 5 and 20, 5 and 15, or 5 and 10 nucleotides in length. In an embodiment the detection reagent, or the target binding site, is between 10 and 2000, 10 and 1000, 10 and 500, 10 and 300, 10 and 250, 10 and 200, 10 and 150, 10 and 100, 10 and 50, 10 and 25, 10 and 20, or 10 and 15, nucleotides in length. In an embodiment the detection reagent, or the target binding site, is between 10 and 2000, 10 and 1000, 20 and 500, 20 and 300, 20 and 250, 20 and 200, 20 and 150, 20 and 100, 20 and 50, or 20 and 25 nucleotides in length. In an embodiment the detection reagent, or the target binding site, is sufficiently long to distinguish between mutant and reference sequences and is less than 100, 200, 300, 400, 500, 1,000, 1,500, and 2,000 nucleotides in length.

[0877] In embodiments, the detection reagent comprises two probes which will bind with a first proximity to one another if a mutation described herein, e.g., a rearrangement or fusion junction, described in FIG. 1A or 1B or in the section herein entitled Nucleic Acid Molecules, is present and with a second proximity if the mutation is not present. Typically, one of the proximities will result in production of a signal and the other will not. E.g., one probe can comprise a signal generator and the other can comprise a signal quencher. If the proximity is close there will be no signal and if the proximity is less close then signal will be produced.

### Preparations of Mutant Nucleic Acid and Uses Thereof

[0878] In another aspect, the invention features purified or isolated preparations of a neoplastic or tumor cell nucleic acid, e.g., DNA, e.g., genomic DNA or cDNA, or RNA, containing an interrogation position described herein, useful for determining if a mutation disclosed herein is present. The nucleic acid includes the interrogation position, and typically additional fusion sequence on one or both sides of the interrogation position. In addition the nucleic acid can contain heterologous sequences, e.g., adaptor or priming sequences, typically attached to one or both terminus of the nucleic acid. The nucleic acid also includes a label or other moiety. e.g., a moiety that allows separation or localization.

[0879] In embodiments, the nucleic acid is between 20 and 1,000, 30 and 900, 40 and 800, 50 and 700, 60 and 600, 70 and 500, 80 and 400, 90 and 300, or 100 and 200 nucleotides in length (with or without heterologous sequences). In one embodiment, the nucleic acid is between 40 and 1,000, 50 and 900, 60 and 800, 70 and 700, 80 and 600, 90 and 500, 100 and 400, 110 and 300, or 120 and 200 nucleotides in length (with or without heterologous sequences). In another embodiment, the nucleic acid is between 50 and 1.000, 50 and 900, 50 and 800, 50 and 700, 50 and 600, 50 and 500, 50 and 400, 50 and 300, or 50 and 200 nucleotides in length (with or without heterologous sequences). In embodiments, the nucleic acid is of sufficient length to allow sequencing (e.g., by chemical sequencing or by determining a difference in Tₘ between mutant and reference preparations) but is optionally less than 100, 200, 300, 400, or 500 nucleotides in length (with or without heterologous sequences).

[0880] Such preparations can be used to sequence nucleic acid from a sample, e.g., a neoplastic or tumor sample. In an embodiment the purified preparation is provided by in situ amplification of a nucleic acid provided on a substrate. In embodiments the purified preparation is spatially distinct from other nucleic acids, e.g., other amplified nucleic acids, on a substrate.

[0881] In an embodiment, the purified or isolated preparation of nucleic acid is derived from a neoplasm or tumor of a type described herein, e.g., neoplasm and/or cancer, e.g., a melanocytic neoplasm, melanoma or metastatic cancer. In one embodiment, the fusion nucleic acid is derived from a histiocytosis, e.g., a non-Langerhans cell histiocytosis.

[0882] Such preparations can be used to determine if a sample comprises mutant sequence, e.g., a translocation as described herein. In one embodiment, the translocation includes a breakpoint. Nucleic acids that include the aforesaid breakpoint, e.g., a breakpoint described herein, are collectively referred to herein as fusion nucleic acids.

[0883] In another aspect, the invention features, a method of determining the sequence of an interrogation position for a mutation described herein, comprising:

[0884] providing a purified or isolated preparations of nucleic acid or fusion nucleic acid, e.g., DNA, e.g., genomic DNA or cDNA, or RNA, containing an interrogation position described herein,

[0885] sequencing, by a method that breaks or forms a chemical bond, e.g., a covalent or non-covalent chemical bond, e.g., in a detection reagent or a target sequence, the nucleic acid so as to determine the identity of the nucleotide at an interrogation position. The method allows determining if a mutation described herein is present.

[0886] In an embodiment, sequencing comprises contacting the fusion nucleic acid with a detection reagent described herein.

[0887] In an embodiment, sequencing comprises determining a physical property, e.g., stability of a duplex form of the fusion nucleic acid (e.g., Tₘ) that can distinguish mutant from reference sequence.

[0888] In an embodiment, the fusion nucleic acid is derived from a neoplasm or a tumor of a type described herein, e.g., a melanocytic neoplasm, melanoma or metastatic cancer. In one embodiment, the fusion nucleic acid is derived from a histiocytosis, e.g., a non-Langerhans cell histiocytosis.

### Reaction Mixtures and Devices

[0889] In another aspect, the invention features, a reaction mixture comprising:

[0890] a) a sample, or nucleic acid. e.g., DNA, e.g., genomic DNA or cDNA, or RNA, e.g., from a cancer, containing:

[0891] an interrogation position for a mutation, e.g., a rearrangement or fusion junction, described in FIG. 1A, 1B or 1C or in the section herein entitled Nucleic Acid Molecules; or

[0892] a mutation, e.g., a rearrangement or fusion junction, described in FIG. 1A or 1B or in the section herein entitled Nucleic Acid Molecules; and

[0893] b) a detection reagent described herein, e.g., a detection reagent described in the section herein entitled, Detection Reagents and Detection of Mutations, e.g., in the section herein entitled, Nucleic Acid-based Detection Reagents.

[0894] In an embodiment, the sample comprises nucleic acid from a cancer.

[0895] In an embodiment the sample, or nucleic acid in the sample, is from a cancer listed in FIG. 1A, and the detection reagent detects a mutant, e.g., a rearrangement or fusion junction disclosed in FIG. 1A, 1B or 1C or in the section herein entitled Nucleic Acid Molecules.

[0896] In an embodiment, the sample, or nucleic acid in the sample, is from a cancer listed in FIG. 1A, and the detection reagent detects a mutant, e.g., a rearrangement or fusion junction disclosed in FIG. 1A, 1B or 1C or in the section herein entitled Nucleic Acid Molecules, in a fusion of the two genes in the fusion associated with that cancer in FIG. 1A.

[0897] In an embodiment:

[0898] the sample, or nucleic acid in the sample, is from a cancer, e.g., a cancer as described herein, and the detection reagent is one that detects a fusion of the CLIP1 and ROS1 genes, e.g., a detection reagent that detects a mutant, e.g., a rearrangement or fusion junction described in FIG. 1A, 1B or 1C or in the section herein entitled Nucleic Acid Molecules, for a fusion of CLIP1 and ROS1;

[0899] the sample, or nucleic acid in the sample, is from a cancer, e.g., a cancer as described herein, and the detection reagent is one that detects a fusion of the PPFIBP1 and ROS1 genes, e.g., a detection reagent that detects a mutant, e.g., a rearrangement or fusion junction described in FIG. 1A, 1B or 1C or in the section herein entitled Nucleic Acid Molecules, for a fusion of PPFIBP1 and ROS1;

[0900] the sample, or nucleic acid in the sample, is from a cancer, e.g., a cancer as described herein, and the detection reagent is one that detects a fusion of the TPM3 and ROS1 genes, e.g., a detection reagent that detects a mutant, e.g., a rearrangement or fusion junction described in FIG. 1A, 1B or 1C or in the section herein entitled Nucleic Acid Molecules, for a fusion of TPM3 and ROS1;

[0901] the sample, or nucleic acid in the sample, is from a cancer, e.g., a cancer as described herein, and the detection reagent is one that detects a fusion of the ZCCHC8 and ROS1 genes, e.g., a detection reagent that detects a mutant, e.g., a rearrangement or fusion junction described in FIG. 1A, 1B or 1C or in the section herein entitled Nucleic Acid Molecules, for a fusion of ZCCHC8 and ROS1;

[0902] the sample, or nucleic acid in the sample, is from a cancer. e.g., a cancer as described herein, and the detection reagent is one that detects a fusion of the MYO5A and ROS1 genes, e.g., a detection reagent that detects a mutant, e.g., a rearrangement or fusion junction described in FIG. 1A, 1B or 1C or in the section herein entitled Nucleic Acid Molecules, for a fusion of MYO5A and ROS1;

[0903] the sample, or nucleic acid in the sample, is from a cancer, e.g., a cancer as described herein, and the detection reagent is one that detects a fusion of the PWWP2A and ROS1 genes, e.g., a detection reagent that detects a mutant, e.g., a rearrangement or fusion junction described in FIG. 1A, 1B or 1C or in the section herein entitled Nucleic Acid Molecules, for a fusion of PWWP2A and ROS1;

[0904] the sample, or nucleic acid in the sample, is from a cancer, e.g., a cancer as described herein, and the detection reagent is one that detects a fusion of the HLA-A and ROS1 genes. e.g., a detection reagent that detects a mutant, e.g., a rearrangement or fusion junction described in FIG. 1A, 1B or 1C or in the section herein entitled Nucleic Acid Molecules, for a fusion of HLA-A and ROS1;

[0905] the sample, or nucleic acid in the sample, is from a cancer, e.g., a cancer as described herein, and the detection reagent is one that detects a fusion of the ERC1 and ROS1 genes, e.g., a detection reagent that detects a mutant, e.g., a rearrangement or fusion junction described in FIG. 1A, 1B or 1C or in the section herein entitled Nucleic Acid Molecules, for a fusion of ERC1 and ROS1;

[0906] the sample, or nucleic acid in the sample, is from a cancer, e.g., a cancer as described herein, and the detection reagent is one that detects a fusion of the TPM3 and ALK genes, e.g., a detection reagent that detects a mutant, e.g., a rearrangement or fusion junction described in FIG. 1A, 1B or 1C or in the section herein entitled Nucleic Acid Molecules, for a fusion of TPM3 and ALK:

[0907] the sample, or nucleic acid in the sample, is from a cancer, e.g., a cancer as described herein, and the detection reagent is one that detects a fusion of the GOLGA5 and RET genes, e.g., a detection reagent that detects a mutant, e.g., a rearrangement or fusion junction described in FIG. 1A, 1B or 1C or in the section herein entitled Nucleic Acid Molecules, for a fusion of GOLGA5 and RET;

[0908] the sample, or nucleic acid in the sample, is from a cancer, e.g., a cancer as described herein, and the detection reagent is one that detects a fusion of the CEP89 and BRAF genes, e.g., a detection reagent that detects a mutant, e.g., a rearrangement or fusion junction described in FIG. 1A, 1B or 1C or in the section herein entitled Nucleic Acid Molecules, for a fusion of CEP89 and BRAF;

[0909] the sample, or nucleic acid in the sample, is from a cancer, e.g., a cancer as described herein, and the detection reagent is one that detects a fusion of the KIF5B and RET genes, e.g., a detection reagent that detects a mutant, e.g., a rearrangement or fusion junction described in FIG. 1A, 1B or 1C or in the section herein entitled Nucleic Acid Molecules, for a fusion of KIF5B and RET;

[0910] the sample, or nucleic acid in the sample, is from a cancer, e.g., a cancer as described herein, and the detection reagent is one that detects a fusion of the TP53 and NTRK1 genes, e.g., a detection reagent that detects a mutant, e.g., a rearrangement or fusion junction described in FIG. 1A, 1B or 1C or in the section herein entitled Nucleic Acid Molecules, for a fusion of TP53 and NTRK1;

[0911] the sample, or nucleic acid in the sample, is from a cancer. e.g., a cancer as described herein, and the detection reagent is one that detects a fusion of the KIAA1598 and ROS1 genes, e.g., a detection reagent that detects a mutant, e.g., a rearrangement or fusion junction described in FIG. 1A, 1B or 1C or in the section herein entitled Nucleic Acid Molecules, for a fusion of KIAA1598 and ROS1;

[0912] the sample, or nucleic acid in the sample, is from a cancer, e.g., a cancer as described herein, and the detection reagent is one that detects a fusion of the DCTN1 and ALK genes, e.g., a detection reagent that detects a mutant, e.g., a rearrangement or fusion junction described in FIG. 1A, 1B or 1C or in the section herein entitled Nucleic Acid Molecules, for a fusion of DCTN1 and ALK:

[0913] the sample, or nucleic acid in the sample, is from a cancer, e.g., a cancer as described herein, and the detection reagent is one that detects a fusion of the LSM14A and BRAF genes, e.g., a detection reagent that detects a mutant, e.g., a rearrangement or fusion junction described in FIG. 1A, 1B or 1C or in the section herein entitled Nucleic Acid Molecules, for a fusion of LSM14A and BRAF:

[0914] the sample, or nucleic acid in the sample, is from a cancer, e.g., a cancer as described herein, and the detection reagent is one that detects a fusion of the LMNA and NTRK1 genes, e.g., a detection reagent that detects a mutant, e.g., a rearrangement or fusion junction described in FIG. 1A, 1B or 1C or in the section herein entitled Nucleic Acid Molecules, for a fusion of LMNA and NTRK1. In another aspect, the invention features, purified or isolated preparations of a fusion nucleic acid, e.g., DNA, e.g., genomic DNA or cDNA, or RNA, containing an interrogation position, e.g., one or both nucleotides flanking the fusion junction, described herein or a mutation, e.g., a rearrangement or fusion junction, described in FIG. 1A, 1B or 1C or in the section herein entitled Nucleic Acid Molecules. In embodiments the preparation is useful for determining if a mutation disclosed herein is present. In embodiments the preparation is disposed in a device, e.g., a sequencing device, or a sample holder for use in such a device. In an embodiment, the fusion nucleic acid is derived from a neoplasm or a tumor of a type described herein, for example melanoma, particularly melanoma with spitzoid histopathological features. In an embodiment the nucleic acid is from a translocation listed in FIG. 1A. In an embodiment the nucleic acid is from a translocation listed in FIG. 1A and the device also includes a detection reagent such as one that detects a fusion of the genes associate with that cancer and listed in FIG. 1A, e.g., a detection reagent that detects a mutant, e.g., a rearrangement or fusion junction described in FIG. 1A, 1B or 1C or in the section herein entitled Nucleic Acid Molecules, for a fusion of the genes that are the fusion partners forming the fusion associated with the cancer and listed in FIG. 1A.

[0915] In another aspect, the invention features, purified or isolated preparations of a fusion nucleic acid, e.g., DNA, e.g., genomic DNA or cDNA, or RNA, containing an interrogation position, e.g., one or both nucleotides flanking the fusion junction, described herein or a mutation, e.g., a rearrangement or fusion junction, described in FIG. 1A or 1B or in the section herein entitled Nucleic Acid Molecules, useful for determining if a mutation disclosed herein is present, disposed in a device for determining a physical or chemical property, e.g., stability of a duplex, e.g., Tₘ or a sample holder for use in such a device. In an embodiment, the device is a calorimeter. In an embodiment the fusion nucleic acid is derived from a neoplasm or a tumor of a type described herein, e.g., in FIG. 1A.

[0916] The detection reagents described herein can be used to determine if a mutation described herein is present in a sample. In embodiments, the sample comprises a nucleic acid that is derived from a neoplastic or a tumor cell, e.g. a cancer described in FIG. 1A. The cell can be from a neoplastic or a tumor sample, e.g., a biopsy taken from the neoplasm or the tumor; from circulating tumor cells, e.g., from peripheral blood; or from a blood or plasma sample.

[0917] In another aspect, the invention features, a method of making a reaction mixture by combining:

a) a sample, or nucleic acid. e.g., DNA, e.g., genomic DNA or cDNA, or RNA, e.g., from a cancer, containing:

[0918] an interrogation position for a mutation, e.g., a rearrangement or fusion junction, described in FIG. 1A, 1B or 1C or in the section herein entitled Nucleic Acid Molecules; or

[0919] a mutation, e.g., a rearrangement or fusion junction, described in FIG. 1A, 1B or 1C or in the section herein entitled Nucleic Acid Molecules; and

[0920] b) a detection reagent described herein, e.g., a detection reagent described in the section herein entitled, Detection Reagents and Detection of Mutations, e.g., in the section herein entitled, Nucleic Acid-based Detection Reagents.

[0921] A mutation described herein, can be distinguished from a reference, e.g., a non-mutant or wild type sequence, by reaction with an enzyme that reacts differentially with the mutation and the reference. E.g., they can be distinguished by cleavage with a restriction enzyme that has differing activity for the mutant and reference sequences. E.g., the invention includes a method of contacting a nucleic acid comprising a mutation described herein with such an enzyme and determining if a product of that cleavage which can distinguish mutant form reference sequence is present.

[0922] In one aspect the inventions provides, a purified preparation of a restriction enzyme cleavage product which can distinguish between mutant and reference sequence, wherein one end of the cleavage product is defined by an enzyme that cleaves differentially between mutant and reference sequence. In an embodiment, the cleavage product includes the interrogation position, e.g., one or both nucleotides flanking the fusion junction.

Protein-Based Detection Reagents, Methods. Reaction Mixtures and Devices

[0923] A mutant protein described herein can be distinguished from a reference, e.g., a non-mutant or wild-type protein, by reaction with a reagent, e.g., a substrate, e.g., a substrate for catalytic activity, e.g., phosphorylation or other fusion protein activity, or an antibody that reacts differentially with the mutant and reference protein. In one aspect, the invention includes a method of contacting a sample comprising a mutant protein described herein with such reagent and determining if the mutant protein is present in the sample.

[0924] Accordingly, in another aspect, the invention features, a reaction mixture comprising:

[0925] a) a sample, e.g., a cancer sample, comprising a fusion protein having fusion partners described in FIG. 1A, 1B or 1C, e.g., a fusion protein encoded by a mutation described in FIG. 1A, 1B or 1C or in the section herein entitled Nucleic Acid Molecules; and

[0926] b) a detection reagent, e.g., a substrate, e.g., a substrate for catalytic activity, e.g., phosphorylation or other fusion protein activity, or an antibody that reacts differentially with the mutant and reference protein.

[0927] In another aspect, the invention features, a method of making a reaction mixture comprising combining:

[0928] a) a sample, e.g., a cancer sample, comprising a fusion protein having fusion partners described in FIG. 1A, 1B or 1C, e.g., a fusion protein encoded by a mutation described in FIG. 1A, 1B or 1C or in the section herein entitled Nucleic Acid Molecules; and

[0929] b) a detection reagent, e.g., a substrate, e.g., a substrate for catalytic activity, e.g., phosphorylation or other fusion protein activity, or an antibody that reacts differentially with the mutant and reference protein.

### Kits

[0930] In another aspect, the invention features a kit comprising one or more detection reagents or sets of detection reagents as described herein.

### Methods Reducing a Fusion Molecule Activity

[0931] In another aspect, the invention features a method of reducing an activity of a fusion molecule described herein. The method includes contacting the fusion molecule, or a fusion molecule-expressing cell, with an agent that inhibits an activity or expression of the fusion molecule (e.g., an inhibitor, e.g., a kinase inhibitor). In one embodiment, the contacting step can be effected in vitro, e.g., in a cell lysate or in a reconstituted system. Alternatively, the method can be performed on cells in culture, e.g., in vitro or ex vivo. In other embodiments, the method can be performed on fusion molecule-expressing cells present in a subject, e.g., as part of an in vivo (e.g., therapeutic or prophylactic) protocol. In an embodiment the method is practiced on an animal subject (e.g., an in vivo animal model). In certain embodiments, the fusion molecule is a nucleic acid molecule or a polypeptide as described herein.

[0932] In a related aspect, a method of inhibiting, reducing, or treating a hyperproliferative disorder, e.g., a neoplasm (including benign, pre-malignant or malignant (e.g., a cancer), in a subject is provided. The method includes administering to the subject a preselected therapeutic agent. e.g., an anti-cancer agent (e.g., a kinase inhibitor), as a single agent, or in combination, in an amount sufficient to reduce, inhibit or treat the activity or expression of a fusion molecule described herein), thereby inhibiting, reducing, or treating the hyperproliferative disorder in the subject. “Treatment” as used herein includes, but is not limited to, inhibiting tumor growth, reducing tumor mass, reducing size or number of metastatic lesions, inhibiting the development of new metastatic lesions, prolonging survival, prolonging progression-free survival, prolonging time to progression, and/or enhancing quality of life.

[0933] In one embodiment, a kinase inhibitor is administered based on a determination that a fusion molecule described herein is present in a subject, e.g., based on its presence in a subject's sample. Thus, treatment can be combined with fusion molecule detection or evaluation method, e.g., as described herein, or administered in response to a determination made by a fusion molecule detection or evaluation method, e.g., as described herein. In certain embodiments, the kinase inhibitor is administered responsive to acquiring knowledge or information of the presence of the fusion molecule in a subject. In one embodiment, the kinase inhibitor is administered responsive to acquiring knowledge or information on the subject's genotype, e.g., acquiring knowledge or information that the patient's genotype has a fusion molecule. In other embodiments, the kinase inhibitor is administered responsive to receiving a communication (e.g., a report) of the presence of the fusion molecule in a subject (e.g., a subject's sample). In yet other embodiments, the kinase inhibitor is administered responsive to information obtained from a collaboration with another party that identifies the presence of the fusion molecule in a subject (e.g., a subject's sample). In other embodiments, the kinase inhibitor is administered responsive to a determination that the fusion molecule is present in a subject. In one embodiment, the determination of the presence of the fusion molecule is carried out using one or more of the methods, e.g., the sequencing methods, described herein. In other embodiments, the determination of the presence of the fusion molecule includes receiving information on the subject's fusion molecule genotype, e.g., from another party or source.

[0934] The methods can, optionally, further include the step(s) of identifying (e.g., evaluating, diagnosing, screening, and/or selecting) a subject at risk of having, or having, a fusion molecule described herein. In one embodiment, the method further includes one or more of: acquiring knowledge or information of the presence of the fusion molecule in a subject (e.g., a subject's sample); acquiring knowledge or information on the subject's genotype, e.g., acquiring knowledge or information that the patient's genotype has a fusion molecule; receiving a communication (e.g., a report) of the presence of the fusion molecule in a subject (e.g., a subject's sample); or collaborating with another party that identifies the presence of the fusion molecule in a subject.

[0935] In one embodiment, the subject treated has a fusion molecule described herein; e.g., the subject has a tumor or cancer harboring a fusion molecule described herein. In other embodiments, the subject has been previously identified as having a fusion molecule described herein. In yet other embodiments, the subject has been previously identified as being likely or unlikely to respond to treatment with a protein kinase inhibitor, e.g., a subject that has previously participated in a clinical trial. In other embodiments, the subject has been previously identified as being likely or unlikely to respond to treatment with a protein kinase inhibitor, based on the presence of the fusion molecule described herein. In one embodiment, the subject is a mammal, e.g., a human. In one embodiment, the subject has, or is at risk of having a cancer at any stage of disease. In other embodiments, the subject is a patient, e.g., a cancer patient.

[0936] In other embodiments, the subject treated is a cancer patient who has participated in a clinical trial. For example, the subject participated in a clinical trial that evaluated a kinase inhibitor (e.g., a multikinase inhibitor, a specific kinase inhibitor). In other embodiment, the subject participated in a clinical trial that evaluates upstream or downstream targets of the specific kinase. In one embodiment, said cancer patient responded to the kinase inhibitor evaluated.

[0937] In certain embodiments, the neoplasm or neoplastic cell is a benign, pre-malignant, malignant (cancer) or metastasis. In certain embodiments, the cancer is a solid tumor, a soft tissue tumor, or a metastatic lesion. In one embodiment, the cancer is chosen from lung adenocarcinoma, cervical adenocarcinoma, uterus endometrial adenocarcinoma, glioblastoma, melanoma, spindle cell sarcoma, ameloblastic fibrosarcoma, adenocarcinoma, cholangiocarcinoma, urothelial (transitional cell) carcinoma, ovarian epithelial carcinoma, colorectal adenocarcinoma, breast carcinoma, prostate carcinoma, or pancreas ductal adenocarcinoma. In one embodiment, the cancer is chosen from a lung cancer, a pancreatic cancer, melanoma, a colorectal cancer, an esophageal-gastric cancer, a thyroid cancer, or an adenocarcinoma. In other embodiment, the lung cancer is chosen from one or more of the following: non-small cell lung cancer (NSCLC), small cell lung cancer (SCLC), squamous cell carcinoma (SCC), adenocarcinoma of the lung, bronchogenic carcinoma, or a combination thereof. In one embodiment, the lung cancer is NSCLC or SCC.

[0938] In one embodiment, the anti-cancer agent is a kinase inhibitor. For example, the kinase inhibitor is a multi-kinase inhibitor or a specific inhibitor.

[0939] In other embodiments, the anti-cancer agent is an antagonist of a fusion molecule described herein which inhibits the expression of nucleic acid encoding the fusion molecule. Examples of such fusion molecule antagonists include nucleic acid molecules, for example, antisense molecules, ribozymes, RNAi, triple helix molecules that hybridize to a nucleic acid encoding a fusion molecule described herein, or a transcription regulatory region, and blocks or reduces mRNA expression of the fusion molecule.

[0940] In other embodiments, the inhibitor, e.g., kinase inhibitor, is administered in combination with a second therapeutic agent or a different therapeutic modality, e.g., anti-cancer agents, and/or in combination with surgical and/or radiation procedures. For example, the second therapeutic agent can be a cytotoxic or a cytostatic agent. Exemplary cytotoxic agents include antimicrotubule agents, topoisomerase inhibitors, or taxanes, antimetabolites, mitotic inhibitors, alkylating agents, intercalating agents, agents capable of interfering with a signal transduction pathway, agents that promote apoptosis and radiation. In yet other embodiments, the methods can be used in combination with immunomodulatory agents, e.g., IL-1, 2, 4, 6, or 12, or interferon alpha or gamma, or immune cell growth factors such as GM-CSF.

### Screening Methods

[0941] In another aspect, the invention features a method, or assay, for screening for agents that modulate, e.g., inhibit, the expression or activity of a fusion molecule described herein. The method includes contacting a fusion molecule described herein, or a cell expressing a fusion molecule described herein, with a candidate agent; and detecting a change in a parameter associated with a fusion molecule described herein, e.g., a change in the expression or an activity of the fusion molecule. The method can, optionally, include comparing the treated parameter to a reference value, e.g., a control sample (e.g., comparing a parameter obtained from a sample with the candidate agent to a parameter obtained from a sample without the candidate agent). In one embodiment, if a decrease in expression or activity of the fusion molecule is detected, the candidate agent is identified as an inhibitor. In another embodiment, if an increase in expression or activity of the fusion molecule is detected, the candidate agent is identified as an activator. In certain embodiments, the fusion molecule is a nucleic acid molecule or a polypeptide as described herein.

[0942] In one embodiment, the contacting step is carried out in a cell-free system. e.g., a cell lysate or in a reconstituted system. In other embodiments, the contacting step is effected in a cell in culture, e.g., a cell expressing a fusion molecule described herein (e.g., a mammalian cell, a tumor cell or cell line, a recombinant cell). In yet other embodiments, the contacting step is effected in a cell in vivo (a fusion molecule-expressing cell present in a subject, e.g., an animal subject (e.g., an in vivo animal model).

[0943] Exemplary parameters evaluated include one or more of:

[0944] (i) a change in binding activity, e.g., direct binding of the candidate agent to a fusion polypeptide described herein; a binding competition between a known ligand and the candidate agent to a fusion polypeptide described herein;

[0945] (ii) a change in kinase activity, e.g., phosphorylation levels of a fusion polypeptide described herein (e.g., an increased or decreased autophosphorylation); or a change in phosphorylation of a target of an kinase. In certain embodiments, a change in kinase activity, e.g., phosphorylation, is detected by any of Western blot (e.g., using an antibody specific for either of the genes associated with a fusion molecule described herein; a phosphor-specific antibody, detecting a shift in the molecular weight of a fusion polypeptide described herein), mass spectrometry, immunoprecipitation, immunohistochemistry, immunomagnetic beads, among others;

[0946] (iii) a change in an activity of a cell containing a fusion molecule described herein (e.g., a tumor cell or a recombinant cell), e.g., a change in proliferation, morphology or tumorigenicity of the cell;

[0947] (iv) a change in tumor present in an animal subject, e.g., size, appearance, proliferation, of the tumor; or

[0948] (v) a change in the level, e.g., expression level, of a fusion polypeptide or nucleic acid molecule described herein.

[0949] In one embodiment, a change in a cell free assay in the presence of a candidate agent is evaluated. For example, an activity of a fusion molecule described herein, or interaction of a fusion molecule described herein with a downstream ligand can be detected. In one embodiment, a fusion polypeptide described herein is contacted with a ligand, e.g., in solution, and a candidate agent is monitored for an ability to modulate, e.g., inhibit, an interaction, e.g., binding, between the fusion polypeptide and the ligand.

[0950] In other embodiments, a change in an activity of a cell is detected in a cell in culture, e.g., a cell expressing a fusion molecule described herein (e.g., a mammalian cell, a tumor cell or cell line, a recombinant cell). In one embodiment, the cell is a recombinant cell that is modified to express a fusion nucleic acid described herein, e.g., is a recombinant cell transfected with a fusion nucleic acid described herein. The transfected cell can show a change in response to the expressed fusion molecule, e.g., increased proliferation, changes in morphology, increased tumorigenicity, and/or acquired a transformed phenotype. A change in any of the activities of the cell, e.g., the recombinant cell, in the presence of the candidate agent can be detected. For example, a decrease in one or more of: proliferation, tumorigenicity, transformed morphology, in the presence of the candidate agent can be indicative of an inhibitor of a fusion molecule described herein. In other embodiments, a change in binding activity or phosphorylation as described herein is detected.

[0951] In yet other embodiment, a change in a tumor present in an animal subject (e.g., an in vivo animal model) is detected. In one embodiment, the animal model is a tumor containing animal or a xenograft comprising cells expressing a fusion molecule described herein (e.g., tumorigenic cells expressing a fusion molecule described herein). The candidate agent can be administered to the animal subject and a change in the tumor is detected. In one embodiment, the change in the tumor includes one or more of a tumor growth, tumor size, tumor burden, survival, is evaluated. A decrease in one or more of tumor growth, tumor size, tumor burden, or an increased survival is indicative that the candidate agent is an inhibitor.

[0952] In other embodiments, a change in expression of a fusion molecule described herein can be monitored by detecting the nucleic acid or protein levels, e.g., using the methods described herein.

[0953] In certain embodiments, the screening methods described herein can be repeated and/or combined. In one embodiment, a candidate agent that is evaluated in a cell-free or cell-based described herein can be further tested in an animal subject.

[0954] In one embodiment, the candidate agent is a small molecule compound, e.g., a kinase inhibitor, a nucleic acid (e.g., antisense, siRNA, aptamer, ribozymes, microRNA), an antibody molecule (e.g., a full antibody or antigen binding fragment thereof that binds to a gene of a fusion molecule described herein). The candidate agent can be obtained from a library (e.g., a commercial library of kinase inhibitors) or rationally designed (e.g., based on the kinase domain of a fusion described herein).

### Methods for Detecting Fusions

[0955] In another aspect, the invention features a method of determining the presence of a fusion as described herein. In one embodiment, the fusion is detected in a nucleic acid molecule or a polypeptide. The method includes detecting whether a fusion nucleic acid molecule or polypeptide is present in a cell (e.g., a circulating cell), a tissue (e.g., a tumor), or a sample, e.g., a tumor sample, from a subject. In one embodiment, the sample is a nucleic acid sample. In one embodiment, the nucleic acid sample comprises DNA, e.g., genomic DNA or cDNA, or RNA, e.g., mRNA. In other embodiments, the sample is a protein sample.

[0956] In one embodiment, the sample is, or has been, classified as non-malignant using other diagnostic techniques, e.g., immunohistochemistry.

[0957] In one embodiment, the sample is acquired from a subject (e.g., a subject having or at risk of having a cancer, e.g., a patient), or alternatively, the method further includes acquiring a sample from the subject. The sample can be chosen from one or more of: tissue, e.g., cancerous tissue (e.g., a tissue biopsy), whole blood, serum, plasma, buccal scrape, sputum, saliva, cerebrospinal fluid, urine, stool, circulating tumor cells, circulating nucleic acids, or bone marrow. In certain embodiments, the sample is a tissue (e.g., a tumor biopsy), a circulating tumor cell or nucleic acid.

[0958] In one embodiment, the cancer is chosen from lung adenocarcinoma, cervical adenocarcinoma, uterus endometrial adenocarcinoma, glioblastoma, melanoma, spindle cell sarcoma, ameloblastic fibrosarcoma, adenocarcinoma, cholangiocarcinoma, urothelial (transitional cell) carcinoma, ovarian epithelial carcinoma, colorectal adenocarcinoma, breast carcinoma, prostate carcinoma, or pancreas ductal adenocarcinoma. In embodiments, the tumor is from a cancer described herein, e.g., is chosen from a lung cancer, a colorectal cancer, an esophageal-gastric cancer, a thyroid cancer, an adenocarcinoma or a melanoma. In one embodiment, the tumor is from a lung cancer, e.g., a NSCLC, a SCLC, a SCC, or a combination thereof.

[0959] In one embodiment, the subject is at risk of having, or has a cancer (e.g., a patient with a cancer described herein).

[0960] In other embodiments, the fusion molecule is detected in a nucleic acid molecule by a method chosen from one or more of: nucleic acid hybridization assay, amplification-based assays (e.g., polymerase chain reaction (PCR)), PCR-RFLP assay, real-time PCR, sequencing, screening analysis (including metaphase cytogenetic analysis by standard karyotype methods, FISH (e.g., break away FISH), spectral karyotyping or MFISH, comparative genomic hybridization), in situ hybridization, SSP, HPLC or mass-spectrometric genotyping.

[0961] In one embodiment, the method includes: contacting a nucleic acid sample, e.g., a genomic DNA sample (e.g., a chromosomal sample or a fractionated, enriched or otherwise pre-treated sample) or a gene product (mRNA, cDNA), obtained from the subject, with a nucleic acid fragment (e.g., a probe or primer as described herein (e.g., an exon-specific probe or primer) under conditions suitable for hybridization, and determining the presence or absence of the fusion nucleic acid molecule. The method can, optionally, include enriching a sample for the gene or gene product.

[0962] In a related aspect, a method for determining the presence of a fusion nucleic acid molecule described herein is provided. The method includes: acquiring a sequence for a position in a nucleic acid molecule, e.g., by sequencing at least one nucleotide of the nucleic acid molecule (e.g., sequencing at least one nucleotide in the nucleic acid molecule that comprises the fusion), thereby determining that the fusion molecule is present in the nucleic acid molecule. Optionally, the sequence acquired is compared to a reference sequence, or a wild type reference sequence. In one embodiment, the nucleic acid molecule is from a cell (e.g., a circulating cell), a tissue (e.g., a tumor), or any sample from a subject (e.g., blood or plasma sample). In other embodiments, the nucleic acid molecule from a tumor sample (e.g., a tumor or cancer sample) is sequenced. In one embodiment, the sequence is determined by a next generation sequencing method. The method further can further include acquiring, e.g., directly or indirectly acquiring, a sample, e.g., a tumor or cancer sample, from a subject (e.g., a patient). In certain embodiments, the cancer is chosen from a lung cancer, colorectal cancer, esophageal-gastric cancer or melanoma.

[0963] In another aspect, the invention features a method of analyzing a tumor or a circulating tumor cell. The method includes acquiring a nucleic acid sample from the tumor or the circulating cell; and sequencing, e.g., by a next generation sequencing method, a nucleic acid molecule, e.g., a nucleic acid molecule that includes a fusion molecule as described herein.

[0964] In yet other embodiment, a fusion polypeptide is detected. The method includes: contacting a protein sample with a reagent which specifically binds to a fusion polypeptide described herein; and detecting the formation of a complex of the fusion polypeptide and the reagent. In one embodiment, the reagent is labeled with a detectable group to facilitate detection of the bound and unbound reagent. In one embodiment, the reagent is an antibody molecule, e.g., is selected from the group consisting of an antibody, and antibody derivative, and an antibody fragment.

[0965] In yet another embodiment, the level (e.g., expression level) or activity the fusion molecule is evaluated. For example, the level (e.g., expression level) or activity of the fusion molecule (e.g., mRNA or polypeptide) is detected and (optionally) compared to a pre-determined value, e.g., a reference value (e.g., a control sample).

[0966] In yet another embodiment, the fusion molecule is detected prior to initiating, during, or after, a treatment, e.g., treatment with a kinase inhibitor, in a subject having a fusion described herein.

[0967] In one embodiment, the fusion molecule is detected at the time of diagnosis with a cancer. In other embodiment, the fusion molecule is detected at a pre-determined interval, e.g., a first point in time and at least at a subsequent point in time.

[0968] In certain embodiments, responsive to a determination of the presence of the fusion molecule, the method further includes one or more of:

[0969] (1) stratifying a patient population (e.g., assigning a subject, e.g., a patient, to a group or class);

[0970] (2) identifying or selecting the subject as likely or unlikely to respond to a treatment, e.g., a kinase inhibitor treatment as described herein;

[0971] (3) selecting a treatment option, e.g., administering or not administering a preselected therapeutic agent, e.g., a kinase inhibitor as described herein; or

[0972] (4) prognosticating the time course of the disease in the subject (e.g., evaluating the likelihood of increased or decreased patient survival).

[0973] In certain embodiments, the kinase inhibitor is a multi-kinase inhibitor or a specific inhibitor.

[0974] In certain embodiments, responsive to the determination of the presence of a fusion molecule described herein, the subject is classified as a candidate to receive treatment with a kinase inhibitor, e.g., a kinase inhibitor as described herein. In one embodiment, responsive to the determination of the presence of a fusion molecule described herein, the subject, e.g., a patient, can further be assigned to a particular class if a fusion is identified in a sample of the patient. For example, a patient identified as having a fusion molecule described herein can be classified as a candidate to receive treatment with a kinase inhibitor, e.g., a specific kinase inhibitor as described herein. In one embodiment, the subject, e.g., a patient, is assigned to a second class if the mutation is not present. For example, a patient who has a lung tumor that does not contain a fusion molecule described herein, may be determined as not being a candidate to receive a kinase inhibitor, e.g., a specific kinase inhibitor as described herein.

[0975] In another embodiment, responsive to the determination of the presence of the fusion molecule, the subject is identified as likely to respond to a treatment that comprises a kinase inhibitor e.g., a kinase inhibitor as described herein.

[0976] In yet another embodiment, responsive to the determination of the presence of the fusion molecule, the method includes administering a kinase inhibitor. e.g., a kinase inhibitor as described herein, to the subject.

### Method of Evaluating a Tumor or a Subject

[0977] In another aspect, the invention features a method of evaluating a subject (e.g., a patient), e.g., for risk of having or developing a cancer, e.g., a lung cancer, colorectal cancer or skin cancer. The method includes: acquiring information or knowledge of the presence of a fusion as described herein in a subject (e.g., acquiring genotype information of the subject that identifies a fusion as being present in the subject); acquiring a sequence for a nucleic acid molecule identified herein (e.g., a nucleic acid molecule that includes a fusion molecule sequence described herein); or detecting the presence of a fusion nucleic acid or polypeptide in the subject), wherein the presence of the fusion is positively correlated with increased risk for, or having, a cancer associated with such a fusion.

[0978] The method can further include acquiring, e.g., directly or indirectly, a sample from a patient and evaluating the sample for the present of a fusion molecule described herein.

[0979] The method can further include the step(s) of identifying (e.g., evaluating, diagnosing, screening, and/or selecting) the subject as being positively correlated with increased risk for, or having, a cancer associated with the fusion molecule.

[0980] In another embodiment, a subject identified has having a fusion molecule described herein is identified or selected as likely or unlikely to respond to a treatment, e.g., a kinase inhibitor treatment as described herein. The method can further include treating the subject with a kinase inhibitor, e.g., a kinase inhibitor as described herein.

[0981] In certain embodiments, the subject is a patient or patient population that has participated in a clinical trial. In one embodiment, the subject has participated in a clinical trial for evaluating a kinase inhibitor (e.g., a multi-kinase inhibitor or a specific kinase inhibitor). In one embodiment, the clinical trial is discontinued or terminated. In one embodiment, the subject responded favorably to the clinical trial, e.g., experience an improvement in at least one symptom of a cancer (e.g., decreased in tumor size, rate of tumor growth, increased survival). In other embodiments, the subject did not respond in a detectable way to the clinical trial.

[0982] In a related aspect, a method of evaluating a patient or a patient population is provided. The method includes: identifying, selecting, or obtaining information or knowledge that the patient or patient population has participated in a clinical trial; acquiring information or knowledge of the presence of a fusion molecule described herein in the patient or patient population (e.g., acquiring genotype information of the subject that identifies a fusion molecule described herein as being present in the subject); acquiring a sequence for a nucleic acid molecule identified herein (e.g., a nucleic acid molecule that includes a fusion sequence); or detecting the presence of a fusion nucleic acid or polypeptide described herein, in the subject), wherein the presence of the fusion identifies the patient or patient population as having an increased risk for, or having, a cancer associated with the fusion molecule.

[0983] In some embodiments, the method further includes treating the subject with a kinase inhibitor, e.g., a kinase inhibitor as described herein.

### Reporting

[0984] Methods described herein can include providing a report, such as, in electronic, web-based, or paper form, to the patient or to another person or entity, e.g., a caregiver, e.g., a physician, e.g., an oncologist, a hospital, clinic, third-party payor, insurance company or government office. The report can include output from the method, e.g., the identification of nucleotide values, the indication of presence or absence of a fusion molecule described herein, or wild type sequence. In one embodiment, a report is generated, such as in paper or electronic form, which identifies the presence or absence of an alteration described herein, and optionally includes an identifier for the patient from whom the sequence was obtained.

[0985] The report can also include information on the role of a fusion molecule described herein, or wild type sequence, in disease. Such information can include information on prognosis, resistance, or potential or suggested therapeutic options. The report can include information on the likely effectiveness of a therapeutic option, the acceptability of a therapeutic option, or the advisability of applying the therapeutic option to a patient, e.g., a patient having a sequence, alteration or mutation identified in the test, and in embodiments, identified in the report. For example, the report can include information, or a recommendation on, the administration of a drug, e.g., the administration at a preselected dosage or in a preselected treatment regimen, e.g., in combination with other drugs, to the patient. In an embodiment, not all mutations identified in the method are identified in the report. For example, the report can be limited to mutations in genes having a preselected level of correlation with the occurrence, prognosis, stage, or susceptibility of the cancer to treatment, e.g., with a preselected therapeutic option. The report can be delivered, e.g., to an entity described herein, within 7, 14, or 21 days from receipt of the sample by the entity practicing the method.

[0986] In another aspect, the invention features a method for generating a report, e.g., a personalized cancer treatment report, by obtaining a sample, e.g., a tumor sample, from a subject, detecting a fusion molecule described herein in the sample, and selecting a treatment based on the mutation identified. In one embodiment, a report is generated that annotates the selected treatment, or that lists, e.g., in order of preference, two or more treatment options based on the mutation identified. In another embodiment, the subject, e.g., a patient, is further administered the selected method of treatment.

[0987] Unless otherwise defined, all technical and scientific terms used herein have the same meaning as commonly understood by one of ordinary skill in the art to which this invention belongs. Although methods and materials similar or equivalent to those described herein can be used in the practice or testing the invention, suitable methods and materials are described below. All publications, patent applications, patents, and other references mentioned herein are incorporated by reference in their entirety. In case of conflict, the present specification, including definitions, will control. In addition, the materials, methods, and the example are illustrative only and not intended to be limiting.

[0988] The details of one or more embodiments featured in the invention are set forth in the accompanying drawings and the description below. Other features, objects, and advantages featured in the invention will be apparent from the description and drawings, and from the claims.

### BRIEF DESCRIPTION OF DRAWINGS

[0989] FIGS. 1A-1C are tables summarizing the fusion molecules and the rearrangement events described herein.

[0990] FIG. 1A summarizes the following: the name of the fusion (referred to as “fusion”); and the type of rearrangement (referred to as “rearrangement”).

[0991] FIG. 1B summarizes the following: the name of the fusion (referred to as “fusion”); the accession number of the full length sequences that contain the 5′- and the 3′-exon sequences (referred to as “5′ Transcript ID” and “3′ Transcript ID,” respectively); and the identity of the last exon of the 5′ transcript and the first exon of the 3′ transcript. The sequences corresponding to the accession numbers provided in FIG. 1B are set forth in the figures appended herein. Alternatively, the sequences can be found by searching the RefSeq Gene as databased at UCSC Genome Browser (genome.ucsc.edu). For example, the following link can be used: http://genome.ucsc.edu/cgi-bin/hgc?hgsid=309144129&c=chr4 &o=1795038&t=1810599&g=reGene&i=NM_{—}000142 to search for Accession Number=NM_{—}000142.

[0992] FIG. 1C summarizes the following: the name of the fusion; the SEQ ID NOs. of the nucleotide (Nt) and amino acid (Aa) sequences of the fusion (if shown), the 5′ partner, and the 3′ partner; and the figure in which the sequence is shown. For example, Nt and Aa sequences of the CLIP1-ROS1 fusion have SEQ ID NOs: 13 and 14, respectively. The Nt and Aa sequences of CLIP1 have SEQ ID NOs: 15 and 16, respectively. The Nt and Aa sequences of ROS1 have SEQ ID NOs: 11 and 12, respectively.

[0993] FIG. 2 depicts genomic aberrations identified in 38 spitzoid neoplasms by targeted sequencing. (a) The columns denote the samples, the rows denote genes, brown squares represent gene fusions, red squares symbolize point mutations and indels, green squares denote gene amplifications and purple squares indicate truncating mutations. The identified fusion genes and HRAS mutations were mutually exclusive in 38 spitzoid neoplasms. Mutations in PKHD1, ERBB4, LRP1B, and amplifications of MCL1 and CCNE1 are of unknown significance and co-occurred with kinase fusions and HRAS mutations. (b) Illustration of the distinct fusion genes for the ROS1, ALK, NTRK1, RET and BRAF rearrangements. The grey bars represent the exons of the genes, the numbers below the bars the exon number and the blue line the predicted breakpoints. The green shaded areas indicate the kinase domain and the blue shaded areas the coiled-coil domain of the fusion gene product. In the TP53-NTRK1 fusion transcript, multiple breakpoints spanning exon 8-12 of TP53 were predicted.

[0994] FIG. 3 depicts ROS1 fusions. (a) Histological section of an atypical Spitz tumor with a PWWP2A ROS1 fusion from the gluteal region of a 55-year-old female (haematoxylin and eosin stain). Scale bar, 500 mm. Scale bar magnification, 50 mm. (b) Immunohistochemistry for ROS shows expression in the melanocytes; stromal cells serve as internal negative controls. Scale bar, 500 mm. Scale bar magnification, 50 mm. The FISH inset confirms the gene rearrangements using breakpoint flanking FISH probes. The rearranged ROS1 locus appears as individual green and red signals, and the wild-type kinase allele with juxtaposed green/red signals. Scale bar, 10 mm. (c) Illustration of the PWWP2A-ROS1 kinase fusion. ROS1 is located on chromosome 1 q21, and PWWP2A on chromosome 5q33. Owing to genomic rearrangements, exon 1 of PWWP2A is fused with exon 36-43 of ROS1, which contains the tyrosine kinase domain. The in-frame fusion junction of the transcript was confirmed by Sanger sequencing. (d) The PWWP2A-ROS1 fusion, but not the control-GFP construct, induces p-AKT, p-ERK, p-S6 and p-SHP2 in melan-a cells. Crizotinib inhibited at least partially the phosphorylation of the chimeric PWWP2A-ROS1 fusion protein, p-AKT, p-S6 and p-SHP2. The indicated protein weight markers in kDa are estimated from molecular weight standards. Results are representative of three independent experiments.

[0995] FIG. 4 depicts ALK fusions. (a) Histologic section of an atypical Spitz tumor excised from the upper arm of a 19-year-old male with a DCTN1-ALK fusion (hematoxylin and eosin stain). Scale bar, 500 μm. Scale bar magnification, 50 μm. (b) Immunohistochemistry shows ALK expression in the melanocytes; stromal cells serve as internal negative controls. Scale bar, 500 μm. Scale bar magnification, 50 μm. (c) FISH demonstrates the ALK gene rearrangement by the individual green and orange signals using breakpoint flanking probes. Scale bar, 10 μm. (d) Illustration of the DCTN1-ALK kinase fusion. ALK is located on chromosome 1p23 and DCTN1 on chromosome 2p13. Due to genomic rearrangements, exon 1-26 of DCTN1 is fused with exon 20 to 29 of ALK, which contains the tyrosine kinase domain. The in-frame junction of the fusion transcript was confirmed with Sanger sequencing. (e) The DCTN1-ALK fusion construct, but not the control-GFP construct, induces p-AKT, p-ERK and p-S6 in melan-a cells. These effects and the phosphorylation of chimeric DCTN1-ALK protein can be inhibited with crizotinib. The indicated protein weight markers in kDa are estimated from molecular weight standards. Results are representative of three independent experiments.

[0996] FIG. 5 depicts NTRK1 fusions. (a) Histologic section of a spitzoid melanoma excised from the left knee of a 39-year-old woman with an LMNA-NTRK1 fusion (hematoxylin and eosin stain). Scale bar, 500 μm. Scale bar magnification, 50 μm. (b) Immunohistochemistry demonstrates the NTRK1 expression in melanocytes; stromal cells serve as internal negative controls. Scale bar, 500 μm. Scale bar magnification, 50 μm. The FISH inset confirms the gene rearrangements using breakpoint flanking FISH probes by the individual green and red signals. Scale bar, 10 μm. (c) The LMNA-NTRK1 kinase fusion is caused by a 743 kb deletion on chromosome 1q, joining the first 2 exons of LMNA with exon 11 to 17 of NTRK1. The in-frame junction of the fusion transcript was confirmed with Sanger sequencing. (d) The LMNA-NTRK1 fusion construct, but not the full-length, wild-type NTRK1 or the control-GFP constructs induce p-AKT, p-ERK, pS6 and p-PLCγ1 in melan-a cells. A small molecule kinase inhibitor, AZ-23, inhibited the phosphorylation of LMNA-NTRK1 and the activation of the oncogenic signaling pathways. The indicated protein weight markers in kDa are estimated from molecular weight standards. Results are representative of three independent experiments.

[0997] FIG. 6 depicts RET fusions. (a) Histologic section of a pigmented spindle cell nevus (a morphologic variant of Spitz nevus) from a 50-year-old woman with a GOLGA5-RET fusion (hematoxylin and eosin stain). Scale bar, 500 μm. Scale bar magnification, 50 μm. (b) RET expression in melanocytes; keratinocytes serve as internal negative controls. Scale bar, 100 μm. The individual green and red signals in FISH confirm the gene rearrangements using breakpoint flanking FISH probes. Scale bar, 10 μm. (c, d) The GOLGA5-RET construct, but not the wild-type, full-length RET or the control-GFP constructs, induces p-AKT, p-ERK, p-S6, and p-PLCγ1 in melan-a cells. The activation of these pathways and the phosphorylation of GOLGA5-RET can be inhibited with (c) vandetanib and (d) cabozantinib. The indicated protein weight markers in kDa are estimated from molecular weight standards. Results are representative of three independent experiments.

[0998] FIG. 7 depicts in vivo tumorigenic potential of kinase fusion in melanocytic cells. All tested kinase fusions stably expressed in melan-a cells formed tumors in NOD/SCID/interleukin 2 receptor γ null mice within 40 days. As expected melan-a stably transduced with NRASG12V and HRASG12V also formed tumors while control GFP did not.

[0999] FIG. 8 depicts full western blots of FIG. 3d. (a) p-ROS1, (b) t-ROS1, (c) p-AKT, (d) t-AKT, (e) p-ERK, (f) t-ERK, (g) p-S6, (h) t-S6, (i) p-SHP2, (j) t-SHP2, (k) Hsp60. All molecular weight standards are indicated in kDa.

[1000] FIG. 9 depicts full western blots of FIG. 4e. (a) p-ALK, (b) t-ALK, (c) p-AKT, (d) t-AKT, (e) p-ERK, (f) t-ERK, (g) p-S6, (h) t-S6, (i) Hsp60. All molecular weight standards are indicated in kDa.

[1001] FIG. 10 depicts full western blots of FIG. 5d. (a) p-NTRK1, (b) t-NTRK1, (c) p-AKT, (d) t-AKT, (e) p-ERK, (f) t-ERK, (g) p-S6, (h) t-S6, (i) p-PLCγ1, (j) t-PLCγ1, (k) Hsp60. All molecular weight standards are indicated in kDa.

[1002] FIG. 11 depicts full western blots of FIG. 6c. (a) p-RET, (b) t-RET, (c) p-AKT (d) t-AKT and p-ERK, (e) t-ERK, (f) p-S6, (g) t-S6, (h) p-PLCγ1, (i) t-PLCγ1, (j) Hsp60. All molecular weight standards are indicated in kDa.

[1003] FIG. 12 depicts full western blots of FIG. 6d. (a) p-RET, (b) t-RET, (c) p-AKT and p-ERK (lower, overexposed band), (d) t-AKT, (e) p-ERK, (f) t-ERK, (g) p-S6, (h) t-S6, (i) p-PLCγ1, (j) t-PLCγ1, (k) Hsp60. All molecular weight standards are indicated in kDa.

### DETAILED DESCRIPTION

[1004] The invention is based, at least in part, on the discovery of novel fusion events, and their association with cancer.

[1005] Certain terms are first defined. Additional terms are defined throughout the specification.

[1006] As used herein, the articles “a” and “an” refer to one or to more than one (e.g., to at least one) of the grammatical object of the article.

[1007] The term “or” is used herein to mean, and is used interchangeably with, the term “and/or”, unless context clearly indicates otherwise.

[1008] “About” and “approximately” shall generally mean an acceptable degree of error for the quantity measured given the nature or precision of the measurements. Exemplary degrees of error are within 20 percent (%), typically, within 10%, and more typically, within 5% of a given value or range of values.

[1009] “Acquire” or “acquiring” as the terms are used herein, refer to obtaining possession of a physical entity, or a value, e.g., a numerical value, by “directly acquiring” or “indirectly acquiring” the physical entity or value. “Directly acquiring” means performing a process (e.g., performing a synthetic or analytical method) to obtain the physical entity or value. “Indirectly acquiring” refers to receiving the physical entity or value from another party or source (e.g., a third party laboratory that directly acquired the physical entity or value). Directly acquiring a physical entity includes performing a process that includes a physical change in a physical substance, e.g., a starting material. Exemplary changes include making a physical entity from two or more starting materials, shearing or fragmenting a substance, separating or purifying a substance, combining two or more separate entities into a mixture, performing a chemical reaction that includes breaking or forming a covalent or non-covalent bond. Directly acquiring a value includes performing a process that includes a physical change in a sample or another substance, e.g., performing an analytical process which includes a physical change in a substance, e.g., a sample, analyte, or reagent (sometimes referred to herein as “physical analysis”), performing an analytical method, e.g., a method which includes one or more of the following: separating or purifying a substance, e.g., an analyte, or a fragment or other derivative thereof, from another substance; combining an analyte, or fragment or other derivative thereof, with another substance. e.g., a buffer, solvent, or reactant; or changing the structure of an analyte, or a fragment or other derivative thereof, e.g., by breaking or forming a covalent or non-covalent bond, between a first and a second atom of the analyte; or by changing the structure of a reagent, or a fragment or other derivative thereof, e.g., by breaking or forming a covalent or non-covalent bond, between a first and a second atom of the reagent.

[1010] “Acquiring a sequence” as the term is used herein, refers to obtaining possession of a nucleotide sequence or amino acid sequence, by “directly acquiring” or “indirectly acquiring” the sequence. “Directly acquiring a sequence” means performing a process (e.g., performing a synthetic or analytical method) to obtain the sequence, such as performing a sequencing method (e.g., a Next Generation Sequencing (NGS) method). “Indirectly acquiring a sequence” refers to receiving information or knowledge of, or receiving, the sequence from another party or source (e.g., a third party laboratory that directly acquired the sequence). The sequence acquired need not be a full sequence, e.g., sequencing of at least one nucleotide, or obtaining information or knowledge that identifies a fusion molecule disclosed herein as being present in a subject constitutes acquiring a sequence.

[1011] Directly acquiring a sequence includes performing a process that includes a physical change in a physical substance, e.g., a starting material, such as a tissue sample, e.g., a biopsy, or an isolated nucleic acid (e.g., DNA or RNA) sample. Exemplary changes include making a physical entity from two or more starting materials, shearing or fragmenting a substance, such as a genomic DNA fragment; separating or purifying a substance (e.g., isolating a nucleic acid sample from a tissue); combining two or more separate entities into a mixture, performing a chemical reaction that includes breaking or forming a covalent or non-covalent bond. Directly acquiring a value includes performing a process that includes a physical change in a sample or another substance as described above.

[1012] “Acquiring a sample” as the term is used herein, refers to obtaining possession of a sample, e.g., a tissue sample or nucleic acid sample, by “directly acquiring” or “indirectly acquiring” the sample. “Directly acquiring a sample” means performing a process (e.g., performing a physical method such as a surgery or extraction) to obtain the sample. “Indirectly acquiring a sample” refers to receiving the sample from another party or source (e.g., a third party laboratory that directly acquired the sample). Directly acquiring a sample includes performing a process that includes a physical change in a physical substance, e.g., a starting material, such as a tissue, e.g., a tissue in a human patient or a tissue that has was previously isolated from a patient. Exemplary changes include making a physical entity from a starting material, dissecting or scraping a tissue; separating or purifying a substance (e.g., a sample tissue or a nucleic acid sample); combining two or more separate entities into a mixture; performing a chemical reaction that includes breaking or forming a covalent or non-covalent bond. Directly acquiring a sample includes performing a process that includes a physical change in a sample or another substance, e.g., as described above.

[1013] “Binding entity” means any molecule to which molecular tags can be directly or indirectly attached that is capable of specifically binding to an analyte. The binding entity can be an affinity tag on a nucleic acid sequence. In certain embodiments, the binding entity allows for separation of the nucleic acid from a mixture, such as an avidin molecule, or an antibody that binds to the hapten or an antigen-binding fragment thereof. Exemplary binding entities include, but are not limited to, a biotin molecule, a hapten, an antibody, an antibody binding fragment, a peptide, and a protein.

[1014] “Complementary” refers to sequence complementarity between regions of two nucleic acid strands or between two regions of the same nucleic acid strand. It is known that an adenine residue of a first nucleic acid region is capable of forming specific hydrogen bonds (“base pairing”) with a residue of a second nucleic acid region which is antiparallel to the first region if the residue is thymine or uracil. Similarly, it is known that a cytosine residue of a first nucleic acid strand is capable of base pairing with a residue of a second nucleic acid strand which is antiparallel to the first strand if the residue is guanine. A first region of a nucleic acid is complementary to a second region of the same or a different nucleic acid if, when the two regions are arranged in an antiparallel fashion, at least one nucleotide residue of the first region is capable of base pairing with a residue of the second region. In certain embodiments, the first region comprises a first portion and the second region comprises a second portion, whereby, when the first and second portions are arranged in an antiparallel fashion, at least about 50%, at least about 75%, at least about 90%, or at least about 95% of the nucleotide residues of the first portion are capable of base pairing with nucleotide residues in the second portion. In other embodiments, all nucleotide residues of the first portion are capable of base pairing with nucleotide residues in the second portion.

[1015] The term “cancer” or “tumor” is used interchangeably herein. These terms refer to the presence of cells possessing characteristics typical of cancer-causing cells, such as uncontrolled proliferation, immortality, metastatic potential, rapid growth and proliferation rate, and certain characteristic morphological features. Cancer cells are often in the form of a tumor, but such cells can exist alone within an animal, or can be a non-tumorigenic cancer cell, such as a leukemia cell. These terms include a solid tumor, a soft tissue tumor, or a metastatic lesion. As used herein, the term “cancer” includes premalignant, as well as malignant cancers. In certain embodiments, the cancer is a solid tumor, a soft tissue tumor, or a metastatic lesion.

[1016] The term “neoplasm” or “neoplastic” cell refers to an abnormal proliferative stage, e.g., a hyperproliferative stage, in a cell or tissue that can include a benign, pre-malignant, malignant (cancer) or metastatic stage.

[1017] The term “fusion” or “fusion molecule” can refer to a polypeptide or a nucleic acid fusion, depending on the context.

[1018] The terms “Spitz neoplasia”, “Spitz neoplasm”, “Spitz tumor”, “Spitz lesion”, “Spitzoid neoplasia”, or “Spitzoid neoplasm”, or “Spitzoid tumor”, or “Spitzoid lesion” are used interchangeably herein. These terms refer to a neoplasm belonging to one of three categories (1) Spitz nevi, or tumors without appreciable abnormality, (2) Spitz tumors with one or more atypical features (atypical Spitz tumor) including those with indeterminate biological malignant potential, and (3) malignant melanoma with histopathological features reminiscent of a Spitz nevus such as large epithelioid or spindled melanocytes (See e.g., Barnhill, R. L. et al., Modern Pathology (2006) 19, S21-S33).

[1019] Cancer is “inhibited” if at least one symptom of the cancer is alleviated, terminated, slowed, or prevented. As used herein, cancer is also “inhibited” if recurrence or metastasis of the cancer is reduced, slowed, delayed, or prevented.

[1020] “Chemotherapeutic agent” means a chemical substance, such as a cytotoxic or cytostatic agent, that is used to treat a condition, particularly cancer.

[1021] As used herein, “cancer therapy” and “cancer treatment” are synonymous terms.

[1022] As used herein, “chemotherapy” and “chemotherapeutic” and “chemotherapeutic agent” are synonymous terms.

[1023] The terms “homology” or “identity,” as used interchangeably herein, refer to sequence similarity between two polynucleotide sequences or between two polypeptide sequences, with identity being a more strict comparison. The phrases “percent identity or homology” and “% identity or homology” refer to the percentage of sequence similarity found in a comparison of two or more polynucleotide sequences or two or more polypeptide sequences. “Sequence similarity” refers to the percent similarity in base pair sequence (as determined by any suitable method) between two or more polynucleotide sequences. Two or more sequences can be anywhere from 0-100% similar, or any integer value there between. Identity or similarity can be determined by comparing a position in each sequence that can be aligned for purposes of comparison. When a position in the compared sequence is occupied by the same nucleotide base or amino acid, then the molecules are identical at that position. A degree of similarity or identity between polynucleotide sequences is a function of the number of identical or matching nucleotides at positions shared by the polynucleotide sequences. A degree of identity of polypeptide sequences is a function of the number of identical amino acids at positions shared by the polypeptide sequences. A degree of homology or similarity of polypeptide sequences is a function of the number of amino acids at positions shared by the polypeptide sequences. The term “substantially identical,” as used herein, refers to an identity or homology of at least 75%, at least 80%, at least 85%, at least 90%, 91%, 92%, 93%, 94%, 95%, 96%, 97%, 98%, 99%, or more.

[1024] “Likely to” or “increased likelihood,” as used herein, refers to an increased probability that an item, object, thing or person will occur. Thus, in one example, a subject that is likely to respond to treatment with a kinase inhibitor, alone or in combination, has an increased probability of responding to treatment with the inhibitor alone or in combination, relative to a reference subject or group of subjects.

[1025] “Unlikely to” refers to a decreased probability that an event, item, object, thing or person will occur with respect to a reference. Thus, a subject that is unlikely to respond to treatment with a kinase inhibitor, alone or in combination, has a decreased probability of responding to treatment with a kinase inhibitor, alone or in combination, relative to a reference subject or group of subjects.

[1026] “Sequencing” a nucleic acid molecule requires determining the identity of at least 1 nucleotide in the molecule. In embodiments, the identities of less than all of the nucleotides in a molecule are determined. In other embodiments, the identities of a majority or all of the nucleotides in the molecule are determined.

[1027] “Next-generation sequencing or next-gen sequencing or NGS or NG sequencing” as used herein, refers to any sequencing method that determines the nucleotide sequence of either individual nucleic acid molecules (e.g., in single molecule sequencing) or clonally expanded proxies for individual nucleic acid molecules in a highly parallel fashion (e.g., greater than 10⁵ molecules are sequenced simultaneously). In one embodiment, the relative abundance of the nucleic acid species in the library can be estimated by counting the relative number of occurrences of their cognate sequences in the data generated by the sequencing experiment. Next generation sequencing methods are known in the art, and are described, e.g., in Metzker, M. (2010) Nature Biotechnology Reviews 11:31-46, incorporated herein by reference. Next generation sequencing can detect a variant present in less than 5% of the nucleic acids in a sample.

[1028] “Sample,” “tissue sample,” “patient sample,” “patient cell or tissue sample” or “specimen” each refers to a collection of similar cells obtained from a tissue of a subject or patient. The source of the tissue sample can be solid tissue as from a fresh, frozen and/or preserved organ, tissue sample, biopsy, or aspirate; blood or any blood constituents; bodily fluids such as cerebral spinal fluid, amniotic fluid, peritoneal fluid or interstitial fluid; or cells from any time in gestation or development of the subject. The tissue sample can contain compounds that are not naturally intermixed with the tissue in nature such as preservatives, anticoagulants, buffers, fixatives, nutrients, antibiotics or the like. In one embodiment, the sample is preserved as a frozen sample or as formaldehyde- or paraformaldehyde-fixed paraffin-embedded (FFPE) tissue preparation. For example, the sample can be embedded in a matrix, e.g., an FFPE block or a frozen sample.

[1029] A “tumor nucleic acid sample” as used herein, refers to nucleic acid molecules from a tumor or cancer sample. Typically, it is DNA, e.g., genomic DNA, or cDNA derived from RNA, from a tumor or cancer sample. In certain embodiments, the tumor nucleic acid sample is purified or isolated (e.g., it is removed from its natural state).

[1030] A “control” or “reference” “nucleic acid sample” as used herein, refers to nucleic acid molecules from a control or reference sample. Typically, it is DNA, e.g., genomic DNA, or cDNA derived from RNA, not containing the alteration or variation in the gene or gene product, e.g., not containing a fusion molecule described herein. In certain embodiments, the reference or control nucleic acid sample is a wild type or a non-mutated sequence. In certain embodiments, the reference nucleic acid sample is purified or isolated (e.g., it is removed from its natural state). In other embodiments, the reference nucleic acid sample is from a non-tumor sample, e.g., a blood control, a normal adjacent tumor (NAT), or any other non-cancerous sample from the same or a different subject.

[1031] “Adjacent to the interrogation position,” as used herein, means that a site sufficiently close such that a detection reagent complementary with the site can be used to distinguish between a mutation, e.g., a mutation described herein, and a reference sequence, e.g., a non-mutant or wild-type sequence, in a target nucleic acid. Directly adjacent, as used herein, is where 2 nucleotides have no intervening nucleotides between them.

[1032] “Associated mutation,” as used herein, refers to a mutation within a preselected distance, in terms of nucleotide or primary amino acid sequence, from a definitional mutation, e.g., a mutant as described herein, e.g., a translocation, breakpoint or fusion molecule described herein. In embodiments, the associated mutation is within n, wherein n is 2, 5, 10, 20, 30, 50, 100, or 200 nucleotides from the definitional mutation (n does not include the nucleotides defining the associated and definitional mutations). In embodiments, the associated mutation is a translocation mutation.

[1033] “Interrogation position,” as used herein, comprises at least one nucleotide (or, in the case of polypeptides, an amino acid residue) which corresponds to a nucleotide (or amino acid residue) that is mutated in a mutation, including, e.g., in the case of a rearrangement, one or both of the nucleotides (or amino acid residues) flanking the breakpoint, or other residue which can be used to distinguish the mutation, of interest, e.g., a mutation being identified, or in a nucleic acid (or protein) being analyzed, e.g., sequenced, or recovered. By way of example, the interrogation position in the breakpoint shown in FIG. 1A, 1B or 1C, includes one, two, or more nucleotide positions at the junction site.

[1034] A “reference sequence,” as used herein, e.g., as a comparator for a mutant sequence, is a sequence which has a different nucleotide or amino acid at an interrogation position than does the mutant(s) being analyzed. In an embodiment, the reference sequence is wild-type for at least the interrogation position.

[1035] Headings, e.g., (a), (b), (i) etc., are presented merely for ease of reading the specification and claims. The use of headings in the specification or claims does not require the steps or elements be performed in alphabetical or numerical order or the order in which they are presented.

[1036] Various aspects featured in the invention are described in further detail below. Additional definitions are set out throughout the specification.

### Isolated Nucleic Acid Molecules

[1037] One aspect of the present disclosure pertains to isolated nucleic acid molecules that include a fusion molecule described herein, including nucleic acids which encode a fusion polypeptide or a portion of such a polypeptide. The nucleic acid molecules include those nucleic acid molecules which reside in genomic regions identified herein. As used herein, the term “nucleic acid molecule” includes DNA molecules (e.g., cDNA or genomic DNA) and RNA molecules (e.g., mRNA) and analogs of the DNA or RNA generated using nucleotide analogs. The nucleic acid molecule can be single-stranded or double-stranded; in certain embodiments the nucleic acid molecule is double-stranded DNA.

[1038] Isolated nucleic acid molecules also include nucleic acid molecules sufficient for use as hybridization probes or primers to identify nucleic acid molecules that correspond to a fusion molecule described herein, e.g., those suitable for use as PCR primers for the amplification or mutation of nucleic acid molecules.

[1039] An “isolated” nucleic acid molecule is one which is separated from other nucleic acid molecules which are present in the natural source of the nucleic acid molecule. In certain embodiments, an “isolated” nucleic acid molecule is free of sequences (such as protein-encoding sequences) which naturally flank the nucleic acid (i.e., sequences located at the 5′ and 3′ ends of the nucleic acid) in the genomic DNA of the organism from which the nucleic acid is derived. For example, in various embodiments, the isolated nucleic acid molecule can contain less than about 5 kB, less than about 4 kB, less than about 3 kB, less than about 2 kB, less than about 1 kB, less than about 0.5 kB or less than about 0.1 kB of nucleotide sequences which naturally flank the nucleic acid molecule in genomic DNA of the cell from which the nucleic acid is derived. Moreover, an “isolated” nucleic acid molecule, such as a cDNA molecule, can be substantially free of other cellular material or culture medium when produced by recombinant techniques, or substantially free of chemical precursors or other chemicals when chemically synthesized.

[1040] The language “substantially free of other cellular material or culture medium” includes preparations of nucleic acid molecule in which the molecule is separated from cellular components of the cells from which it is isolated or recombinantly produced. Thus, nucleic acid molecule that is substantially free of cellular material includes preparations of nucleic acid molecule having less than about 30%, less than about 20%, less than about 10%, or less than about 5% (by dry weight) of other cellular material or culture medium.

[1041] A fusion nucleic acid molecule can be isolated using standard molecular biology techniques and the sequence information in the database records described herein. Using all or a portion of such nucleic acid sequences, fusion nucleic acid molecules as described herein can be isolated using standard hybridization and cloning techniques (e.g., as described in Sambrook et al., ed., Molecular Cloning: A Laboratory Manual, 2nd ed. Cold Spring Harbor Laboratory Press, Cold Spring Harbor, N. Y., 1989).

[1042] A fusion nucleic acid molecule (e.g., fusion molecule described herein) can be amplified using cDNA, mRNA, or genomic DNA as a template and appropriate oligonucleotide primers according to standard PCR amplification techniques. The nucleic acid molecules so amplified can be cloned into an appropriate vector and characterized by DNA sequence analysis. Furthermore, oligonucleotides corresponding to all or a portion of a nucleic acid molecule featured in the invention can be prepared by standard synthetic techniques, e.g., using an automated DNA synthesizer.

[1043] In another embodiment, a fusion nucleic acid molecule (e.g., fusion molecule described herein) comprises a nucleic acid molecule which has a nucleotide sequence complementary to the nucleotide sequence of the fusion nucleic acid molecule or to the nucleotide sequence of a nucleic acid encoding a fusion protein. A nucleic acid molecule which is complementary to a given nucleotide sequence is one which is sufficiently complementary to the given nucleotide sequence that it can hybridize to the given nucleotide sequence thereby forming a stable duplex.

[1044] Moreover, a fusion nucleic acid molecule can comprise only a portion of a nucleic acid sequence, wherein the full length nucleic acid sequence or which encodes a fusion polypeptide. Such nucleic acid molecules can be used, for example, as a probe or primer. The probe/primer typically is used as one or more substantially purified oligonucleotides. The oligonucleotide typically comprises a region of nucleotide sequence that hybridizes under stringent conditions to at least about 7, at least about 15, at least about 25, at least about 50, at least about 75, at least about 100, at least about 125, at least about 150, at least about 175, at least about 200, at least about 250, at least about 300, at least about 350, at least about 400, at least about 500, at least about 600, at least about 700, at least about 800, at least about 900, at least about 1 kb, at least about 2 kb, at least about 3 kb, at least about 4 kb, at least about 5 kb, at least about 6 kb, at least about 7 kb, at least about 8 kb, at least about 9 kb, at least about 10 kb, at least about 15 kb, at least about 20 kb, at least about 25 kb, at least about 30 kb, at least about 35 kb, at least about 40 kb, at least about 45 kb, at least about 50 kb, at least about 60 kb, at least about 70 kb, at least about 80 kb, at least about 90 kb, at least about 100 kb, at least about 200 kb, at least about 300 kb, at least about 400 kb, at least about 500 kb, at least about 600 kb, at least about 700 kb, at least about 800 kb, at least about 900 kb, at least about 1 mb, at least about 2 mb, at least about 3 mb, at least about 4 mb, at least about 5 mb, at least about 6 mb, at least about 7 mb, at least about 8 mb, at least about 9 mb, at least about 10 mb or more consecutive nucleotides of a fusion nucleic acid described herein.

[1045] The disclosure further describes nucleic acid molecules that are substantially identical to the gene mutations and/or gene products described herein, such that they are at least 70%, at least 75%, at least 80%, at least 85%, at least 86%, at least 87%, at least 88%, at least 89%, at least 90%, at least 91%, at least 92%, at least 93%, at least 94%, at least 95%, at least 96%, at least 97%, at least 98%, at least 99%, at least 99.5% or greater. The disclosure further describes nucleic acid molecules that are substantially identical to the gene mutations and/or gene products described herein, such that they are at least 70%, at least 75%, at least 80%, at least 85%, at least 86%, at least 87%, at least 88%, at least 89%, at least 90%, at least 91%, at least 92%, at least 93%, at least 94%, at least 95%, at least 96%, at least 97%, at least 98%, at least 99%, at least 99.5% or greater.

[1046] In other embodiments, the invention further encompasses nucleic acid molecules that are substantially homologous to fusion gene mutations and/or gene products described herein, such that they differ by only or at least 1, at least 2, at least 3, at least 4, at least 5, at least 6, at least 7, at least 8, at least 9, at least 10, at least 11, at least 12, at least 13, at least 14, at least 15, at least 16, at least 17, at least 18, at least 19, at least 20, at least 30, at least 40, at least 50, at least 60, at least 70, at least 80, at least 90, at least 100, at least 200, at least 300, at least 400, at least 500, at least 600 nucleotides or any range in between.

[1047] In another embodiment, an isolated fusion nucleic acid molecule described herein is at least 7, at least 15, at least 20, at least 25, at least 30, at least 35, at least 40, at least 45, at least 50, at least 55, at least 60, at least 65, at least 70, at least 75, at least 80, at least 85, at least 90, at least 95, at least 100, at least 125, at least 150, at least 175, at least 200, at least 250, at least 300, at least 350, at least 400, at least 450, at least 550, at least 650, at least 700, at least 800, at least 900, at least 1000, at least 1200, at least 1400, at least 1600, at least 1800, at least 2000, at least 2200, at least 2400, at least 2600, at least 2800, at least 3000, or more nucleotides in length and hybridizes under stringent conditions to a fusion nucleic acid molecule or to a nucleic acid molecule encoding a protein corresponding to a marker featured in the invention.

[1048] As used herein, the term “hybridizes under stringent conditions” is intended to describe conditions for hybridization and washing under which nucleotide sequences at least 60%, at least 65%, at least 70%, at least 75%, at least 80%, or at least 85% identical to each other typically remain hybridized to each other. Such stringent conditions are known to those skilled in the art and can be found in sections 6.3.1-6.3.6 of Current Protocols in Molecular Biology, John Wiley & Sons, N.Y. (1989), incorporated herein by reference. Another, non-limiting example of stringent hybridization conditions are hybridization in 6× sodium chloride/sodium citrate (SSC) at about 45° C., followed by one or more washes in 0.2×SSC, 0.1% SDS at 50-65° C.

[1049] The disclosure is also directed to molecular beacon nucleic acid molecules having at least one region which is complementary to a fusion nucleic acid molecule described herein, such that the molecular beacon is useful for quantitating the presence of the nucleic acid molecule featured in the invention in a sample. A “molecular beacon” nucleic acid is a nucleic acid molecule comprising a pair of complementary regions and having a fluorophore and a fluorescent quencher associated therewith. The fluorophore and quencher are associated with different portions of the nucleic acid in such an orientation that when the complementary regions are annealed with one another, fluorescence of the fluorophore is quenched by the quencher. When the complementary regions of the nucleic acid molecules are not annealed with one another, fluorescence of the fluorophore is quenched to a lesser degree. Molecular beacon nucleic acid molecules are described, for example, in U.S. Pat. No. 5,876,930, incorporated herein by reference.

### Probes

[1050] The invention also provides isolated nucleic acid molecules useful as probes. Such nucleic acid probes can be designed based on the sequence of a fusion molecule described herein.

[1051] Probes based on the sequence of a fusion nucleic acid molecule as described herein can be used to detect transcripts or genomic sequences corresponding to one or more markers featured in the invention. The probe comprises a label group attached thereto, e.g., a radioisotope, a fluorescent compound, an enzyme, or an enzyme co-factor. Such probes can be used as part of a test kit for identifying cells or tissues which express the fusion protein (e.g., a fusion described herein), such as by measuring levels of a nucleic acid molecule encoding the protein in a sample of cells from a subject, e.g., detecting mRNA levels or determining whether a gene encoding the protein has been mutated or deleted.

[1052] Probes featured in the invention include those that will specifically hybridize to a gene sequence described in the Examples, e.g., fusion molecule described herein. Typically these probes are 12 to 20. e.g., 17 to 20 nucleotides in length (longer for large insertions) and have the nucleotide sequence corresponding to the region of the mutations at their respective nucleotide locations on the gene sequence. Such molecules can be labeled according to any technique known in the art, such as with radiolabels, fluorescent labels, enzymatic labels, sequence tags, biotin, other ligands, etc. As used herein, a probe that “specifically hybridizes” to a fusion gene sequence will hybridize under high stringency conditions.

[1053] A probe will typically contain one or more of the specific mutations described herein. Typically, a nucleic acid probe will encompass only one mutation. Such molecules may be labeled and can be used as allele-specific probes to detect the mutation of interest.

[1054] In one aspect, the invention features a probe or probe set that specifically hybridizes to a nucleic acid comprising an inversion resulting in a fusion molecule described herein. In another aspect, the invention features a probe or probe set that specifically hybridizes to a nucleic acid comprising a deletions resulting in a fusion molecule described herein.

[1055] Isolated pairs of allele specific oligonucleotide probes are also provided, where the first probe of the pair specifically hybridizes to the mutant allele, and the second probe of the pair specifically hybridizes to the wild type allele. For example, in one exemplary probe pair, one probe will recognize the fusion junction in the CEP89-BRAF fusion, and the other probe will recognize a sequence downstream or upstream of CEP89 or BRAF, neither of which includes the fusion junction. These allele-specific probes are useful in detecting a BRAF somatic mutation in a tumor sample, e.g., lung adenocarcinoma sample. In a similar manner, probe pairs can be designed and produced for any of the fusion molecule described herein, and are useful in detecting an somatic mutation in a tumor sample.

### Primers

[1056] The invention also provides isolated nucleic acid molecules useful as primers.

[1057] The term “primer” as used herein refers to a sequence comprising two or more deoxyribonucleotides or ribonucleotides, e.g., more than three, and more than eight, or at least 20 nucleotides of a gene described in the Example, where the sequence corresponds to a sequence flanking one of the mutations or a wild type sequence of a gene identified in the Example, e.g., any gene described herein involved in a fusion described herein. Primers may be used to initiate DNA synthesis via the PCR (polymerase chain reaction) or a sequencing method. Primers featured in the invention include the sequences recited and complementary sequences which would anneal to the opposite DNA strand of the sample target. Since both strands of DNA are complementary and mirror images of each other, the same segment of DNA will be amplified.

[1058] Primers can be used to sequence a nucleic acid, e.g., an isolated nucleic acid described herein, such as by an NGS method, or to amplify a gene described in the Examples, such as by PCR. The primers can specifically hybridize, for example, to the ends of the exons or to the introns flanking the exons. The amplified segment can then be further analyzed for the presence of the mutation such as by a sequencing method. The primers are useful in directing amplification of a target polynucleotide prior to sequencing. In another aspect, the present disclosure features a pair of oligonucleotide primers that amplify a region that contains or is adjacent to a fusion junction identified in the Examples. Such primers are useful in directing amplification of a target region that includes a fusion junction identified in the Example, e.g., prior to sequencing. The primer typically contains 12 to 20, or 17 to 20, or more nucleotides, although a primer may contain fewer nucleotides.

[1059] A primer is typically single stranded, e.g., for use in sequencing or amplification methods, but may be double stranded. If double stranded, the primer may first be treated to separate its strands before being used to prepare extension products. A primer must be sufficiently long to prime the synthesis of extension products in the presence of the inducing agent for polymerization. The exact length of primer will depend on many factors, including applications (e.g., amplification method), temperature, buffer, and nucleotide composition. A primer typically contains 12-20 or more nucleotides, although a primer may contain fewer nucleotides.

[1060] Primers are typically designed to be “substantially” complementary to each strand of a genomic locus to be amplified. Thus, the primers must be sufficiently complementary to specifically hybridize with their respective strands under conditions which allow the agent for polymerization to perform. In other words, the primers should have sufficient complementarity with the 5′ and 3′ sequences flanking the mutation to hybridize therewith and permit amplification of the genomic locus.

[1061] The term “substantially complementary to” or “substantially the sequence” refers to sequences that hybridize to the sequences provided under stringent conditions and/or sequences having sufficient homology with a sequence comprising a fusion junction identified in the Example, or the wild type counterpart sequence, such that the allele specific oligonucleotides hybridize to the sequence. In one embodiment, a sequence is substantially complementary to a fusion junction in an inversion event, e.g., to a fusion junction in any fusion molecule described herein. “Substantially the same” as it refers to oligonucleotide sequences also refers to the functional ability to hybridize or anneal with sufficient specificity to distinguish between the presence or absence of the mutation. This is measurable by the temperature of melting being sufficiently different to permit easy identification of whether the oligonucleotide is binding to the normal or mutant gene sequence identified in the Example.

[1062] In one aspect, the invention features a primer or primer set for amplifying a nucleic acid comprising an inversion resulting in a fusion described herein. In another aspect, the invention features a primer or primer set for amplifying a nucleic acid comprising a deletion resulting in fusion described herein.

[1063] Isolated pairs of allele specific oligonucleotide primer are also provided, where the first primer of the pair specifically hybridizes to the mutant allele, and the second primer of the pair specifically hybridizes to a sequence upstream or downstream of a mutation, or a fusion junction resulting from, e.g., an inversion, duplication, deletion, insertion or translocation. In one exemplary primer pair, one probe will recognize a CEP89-BRAF fusion, such as by hybridizing to a sequence at the fusion junction between the CEP89 and BRAF transcripts, and the other primer will recognize a sequence upstream or downstream of the fusion junction. These allele-specific primers are useful for amplifying a CEP89-BRAF fusion sequence from a tumor sample, e.g., a biopsy, e.g., a biopsy from a suspected cancer.

[1064] In another exemplary primer pair, one primer can recognize an CEP89-BRAF translocation (e.g., the reciprocal of the CEP89-BRAF translocation), such as by hybridizing to a sequence at the fusion junction between the CEP89 and BRAF transcripts, and the other primer will recognize a sequence upstream or downstream of the fusion junction. These allele-specific primers are useful for amplifying a CEP89-BRAF fusion sequence from a tumor sample, e.g., a cancer sample or biopsy or biopsy sample.

[1065] Primers can be prepared using any suitable method, such as conventional phosphotriester and phosphodiester methods or automated embodiments thereof. In one such automated embodiment, diethylphosphoramidites are used as starting materials and may be synthesized as described by Beaucage, et al., Tetrahedron Letters, 22:1859-1862, (1981), incorporated herein by reference. One method for synthesizing oligonucleotides on a modified solid support is described in U.S. Pat. No. 4,458,066, incorporated herein by reference.

[1066] An oligonucleotide probe or primer that hybridizes to a mutant or wild type allele is said to be the complement of the allele. As used herein, a probe exhibits “complete complementarity” when every nucleotide of the probe is complementary to the corresponding nucleotide of the allele. Two polynucleotides are said to be “minimally complementary” if they can hybridize to one another with sufficient stability to permit them to remain annealed to one another under at least conventional “low-stringency” conditions. Similarly, the polynucleotides are said to be “complementary” if they can hybridize to one another with sufficient stability to permit them to remain annealed to one another under conventional “high-stringency” conditions. Conventional stringency conditions are known to those skilled in the art and can be found, for example in Molecular Cloning: A Laboratory Manual, 3rd edition Volumes 1, 2, and 3. J. F. Sambrook, D. W. Russell, and N. Irwin, Cold Spring Harbor Laboratory Press, 2000, incorporated herein by reference.

[1067] Departures from complete complementarity are therefore permissible, as long as such departures do not completely preclude the capacity of a probe to hybridize to an allele. Thus, in order for a polynucleotide to serve as a primer or probe it need only be sufficiently complementary in sequence to be able to form a stable double-stranded structure under the particular solvent and salt concentrations employed. Appropriate stringency conditions which promote DNA hybridization are, for example, 6.0× sodium chloride/sodium citrate (SSC) at about 45° C., followed by a wash of 2.0×SSC at 50° C. Such conditions are known to those skilled in the art and can be found, for example in Current Protocols in Molecular Biology, John Wiley & Sons, N.Y. (1989), incorporated herein by reference. Salt concentration and temperature in the wash step can be adjusted to alter hybridization stringency. For example, conditions may vary from low stringency of about 2.0×SSC at 40° C. to moderately stringent conditions of about 2.0×SSC at 50° C. to high stringency conditions of about 0.2×SSC at 50° C.

### Fusion Proteins and Antibodies

[1068] One aspect featured in the invention pertains to purified fusion polypeptides, and biologically active portions thereof. The fusion polypeptide can be any fusion molecule described herein. In one embodiment, the native fusion polypeptide can be isolated from cells or tissue sources by an appropriate purification scheme using standard protein purification techniques. In another embodiment, a fusion polypeptide is produced by recombinant DNA techniques. Alternative to recombinant expression, a fusion polypeptide described herein can be synthesized chemically using standard peptide synthesis techniques.

[1069] An “isolated” or “purified” protein or biologically active portion thereof is substantially free of cellular material or other contaminating proteins from the cell or tissue source from which the protein is derived, or substantially free of chemical precursors or other chemicals when chemically synthesized. The language “substantially free of cellular material” includes preparations of protein in which the protein is separated from cellular components of the cells from which it is isolated or recombinantly produced. Thus, protein that is substantially free of cellular material includes preparations of protein having less than about 30%, less than about 20%, less than about 10%, or less than about 5% (by dry weight) of heterologous protein (also referred to herein as a “contaminating protein”). When the protein or biologically active portion thereof is recombinantly produced, it can be substantially free of culture medium, i.e., culture medium represents less than about 20%, less than about 10%, or less than about 5% of the volume of the protein preparation. When the protein is produced by chemical synthesis, it can substantially be free of chemical precursors or other chemicals, i.e., it is separated from chemical precursors or other chemicals which are involved in the synthesis of the protein. Accordingly such preparations of the protein have less than about 30%, less than about 20%, less than about 10%, less than about 5% (by dry weight) of chemical precursors or compounds other than the polypeptide of interest.

[1070] Biologically active portions of a fusion polypeptide include polypeptides comprising amino acid sequences sufficiently identical to or derived from the amino acid sequence of the fusion protein, which include fewer amino acids than the full length protein, and exhibit at least one activity of the corresponding full-length protein, e.g., a kinase activity e.g., a BRAF kinase activity. A biologically active portion of a protein featured in the invention can be a polypeptide which is, for example, 10, 25, 50, 100 or more amino acids in length. Moreover, other biologically active portions, in which other regions of the protein are deleted, can be prepared by recombinant techniques and evaluated for one or more of the functional activities of the native form of a polypeptide.

[1071] In certain embodiments, the fusion polypeptide described herein has an amino acid sequence of a protein encoded by a nucleic acid molecule disclosed herein. Other useful proteins are substantially identical (e.g., at least 60, at least 65, at least 70, at least 75, at least 80, at least 85, at least 86, at least 87, at least 88, at least 89, at least 90, at least 91, at least 92, at least 93, at least 94, at least 95, at least 96, at least 97, at least 98, at least 99, at least 99.5% or greater) to one of these sequences and retain the functional activity of the protein of the corresponding full-length protein yet differ in amino acid sequence.

[1072] To determine the percent identity of two amino acid sequences or of two nucleic acids, the sequences are aligned for optimal comparison purposes (e.g., gaps can be introduced in the sequence of a first amino acid or nucleic acid sequence for optimal alignment with a second amino or nucleic acid sequence). The amino acid residues or nucleotides at corresponding amino acid positions or nucleotide positions are then compared. When a position in the first sequence is occupied by the same amino acid residue or nucleotide as the corresponding position in the second sequence, then the molecules are identical at that position. The percent identity between the two sequences is a function of the number of identical positions shared by the sequences (i.e., % identity=# of identical positions/total # of positions (e.g., overlapping positions)×100). In one embodiment the two sequences are the same length.

[1073] The determination of percent identity between two sequences can be accomplished using a mathematical algorithm. Another, non-limiting example of a mathematical algorithm utilized for the comparison of two sequences is the algorithm of Karlin and Altschul (1990) Proc. Natl. Acad. Sci. USA 87:2264-2268, modified as in Karlin and Altschul (1993) Proc. Natl. Acad. Sci. USA 90:5873-5877, incorporated herein by reference. Such an algorithm is incorporated into the NBLAST and XBLAST programs of Altschul, et al. (1990) J. Mol. Biol. 215:403-410, incorporated herein by reference. BLAST nucleotide searches can be performed with the NBLAST program, score=100, word length=12 to obtain nucleotide sequences homologous to a nucleic acid molecules featured in the invention. BLAST protein searches can be performed with the XBLAST program, score=50, word length=3 to obtain amino acid sequences homologous to protein molecules featured in the invention. To obtain gapped alignments for comparison purposes, Gapped BLAST can be utilized as described in Altschul et al. (1997) Nucleic Acids Res. 25:3389-3402, incorporated herein by reference. Alternatively, PSI-Blast can be used to perform an iterated search which detects distant relationships between molecules. When utilizing BLAST, Gapped BLAST, and PSI-Blast programs, the default parameters of the respective programs (e.g., XBLAST and NBLAST) can be used. See http://www.ncbi.nlm.nih.gov. Another non-limiting example of a mathematical algorithm utilized for the comparison of sequences is the algorithm of Myers and Miller, (1988) Comput Appl Biosci, 4:11-7, incorporated herein by reference. Such an algorithm is incorporated into the ALIGN program (version 2.0) which is part of the GCG sequence alignment software package. When utilizing the ALIGN program for comparing amino acid sequences, a PAM120 weight residue table, a gap length penalty of 12, and a gap penalty of 4 can be used. Yet another useful algorithm for identifying regions of local sequence similarity and alignment is the FASTA algorithm as described in Pearson and Lipman (1988) Proc. Natl. Acad. Sci. USA 85:2444-2448, incorporated herein by reference. When using the FASTA algorithm for comparing nucleotide or amino acid sequences, a PAM120 weight residue table can, for example, be used with a k-tuple value of 2.

[1074] The percent identity between two sequences can be determined using techniques similar to those described above, with or without allowing gaps. In calculating percent identity, only exact matches are counted.

[1075] An isolated fusion polypeptide (e.g., a fusion described herein), or a fragment thereof, can be used as an immunogen to generate antibodies using standard techniques for polyclonal and monoclonal antibody preparation. The full-length fusion polypeptide can be used or, alternatively, the invention provides antigenic peptide fragments for use as immunogens. The antigenic peptide of a protein featured in the invention comprises at least 8 (or at least 10, at least 15, at least 20, or at least 30 or more) amino acid residues of the amino acid sequence of one of the polypeptides featured in the invention, and encompasses an epitope of the protein such that an antibody raised against the peptide forms a specific immune complex with a marker featured in the invention to which the protein corresponds. Exemplary epitopes encompassed by the antigenic peptide are regions that are located on the surface of the protein, e.g., hydrophilic regions. Hydrophobicity sequence analysis, hydrophilicity sequence analysis, or similar analyses can be used to identify hydrophilic regions.

[1076] An immunogen typically is used to prepare antibodies by immunizing a suitable (i.e., immunocompetent) subject such as a rabbit, goat, mouse, or other mammal or vertebrate. An appropriate immunogenic preparation can contain, for example, recombinantly-expressed or chemically-synthesized polypeptide. The preparation can further include an adjuvant, such as Freund's complete or incomplete adjuvant, or a similar immunostimulatory agent.

[1077] Accordingly, another aspect featured in the invention pertains to antibodies directed against a fusion polypeptide described herein. In one embodiment, the antibody molecule specifically binds to fusion molecule described herein, e.g., specifically binds to an epitope formed by the fusion. In embodiments the antibody can distinguish wild type genes that make up the fusion, from the fusion of the genes, e.g., the antibody can distinguish wild type genes, e.g., BRAF (or CEP89) from CEP89-BRAF.

[1078] The terms “antibody” and “antibody molecule” as used interchangeably herein refer to immunoglobulin molecules and immunologically active portions of immunoglobulin molecules, i.e., molecules that contain an antigen binding site which specifically binds an antigen, such as a polypeptide featured in the invention. A molecule which specifically binds to a given polypeptide featured in the invention is a molecule which binds the polypeptide, but does not substantially bind other molecules in a sample, e.g., a biological sample, which naturally contains the polypeptide. Examples of immunologically active portions of immunoglobulin molecules include F(ab) and F(ab′)₂ fragments which can be generated by treating the antibody with an enzyme such as pepsin. The invention provides polyclonal and monoclonal antibodies. The term “monoclonal antibody” or “monoclonal antibody composition,” as used herein, refers to a population of antibody molecules that contain only one species of an antigen binding site capable of immunoreaction with a particular epitope.

[1079] Polyclonal antibodies can be prepared as described above by immunizing a suitable subject with a fusion polypeptide as an immunogen. Antibody-producing cells can be obtained from the subject and used to prepare monoclonal antibodies by standard techniques, such as the hybridoma technique originally described by Kohler and Milstein (1975) Nature 256:495-497, the human B cell hybridoma technique (see Kozbor et al., 1983, Immunol. Today, 4:72), the EBV-hybridoma technique (see Cole et. al., pp. 77-96 In Monoclonal Antibodies and Cancer Therapy, Alan R. Liss, Inc., 1985) or trioma techniques, all incorporated herein by reference. The technology for producing hybridomas is well known (see generally Current Protocols in Immunology, Coligan et al. ed., John Wiley & Sons, New York, 1994, incorporated herein by reference). Hybridoma cells producing a monoclonal antibody are detected by screening the hybridoma culture supernatants for antibodies that bind the polypeptide of interest, e.g., using a standard ELISA assay.

[1080] Alternative to preparing monoclonal antibody-secreting hybridomas, a monoclonal antibody can be identified and isolated by screening a recombinant combinatorial immunoglobulin library (e.g., an antibody phage display library) with the polypeptide of interest. Kits for generating and screening phage display libraries are commercially available (e.g., the Pharmacia Recombinant Phage Antibody System, Catalog No. 27-9400-01; and the Stratagene SurfZAP Phage Display Kit, Catalog No. 240612). Additionally, examples of methods and reagents particularly amenable for use in generating and screening antibody display library can be found in, for example, U.S. Pat. No. 5,223,409; PCT Publication No. WO 92/18619; PCT Publication No. WO 91/17271; PCT Publication No. WO 92/20791; PCT Publication No. WO 92/15679; PCT Publication No. WO 93/01288; PCT Publication No. WO 92/01047; PCT Publication No. WO 92/09690; PCT Publication No. WO 90/02809; Fuchs et al. (1991) Bio/Technology 9:1370-1372; Hay et al. (1992) Hum. Antibod. Hybridomas 3:81-85; Huse et al. (1989) Science 246:1275-1281; Griffiths et al. (1993) EMBO J. 12:725-734, all incorporated herein by reference.

[1081] Additionally, recombinant antibodies, such as chimeric and humanized monoclonal antibodies, comprising both human and non-human portions can be made using standard recombinant DNA techniques. Such chimeric and humanized monoclonal antibodies can be produced by recombinant DNA techniques known in the art, for example using methods described in PCT Publication No. WO 87/02671; European Patent Application 184, 187; European Patent Application 171,496; European Patent Application 173,494; PCT Publication No. WO 86/01533; U.S. Pat. No. 4,816,567; European Patent Application 125,023; Better et al. (1988) Science 240:1041-1043; Liu et al. (1987) Proc. Natl. Acad. Sci. USA 84:3439-3443; Liu et al. (1987) J. Immunol. 139:3521-3526; Sun et al. (1987) Proc. Natl. Acad. Sci. USA 84:214-218; Nishimura et al. (1987) Cancer Res. 47:999-1005; Wood et al. (1985) Nature 314:446-449; and Shaw et al. (1988) J. Natl. Cancer Inst. 80:1553-1559; Morrison (1985) Science 229:1202-1207; Oi et al. (1986) Bio/Techniques 4:214; U.S. Pat. No. 5,225,539; Jones et al. (1986) Nature 321:552-525; Verhoeyan et al. (1988) Science 239:1534; and Beidler et al. (1988) J. Immunol. 141:4053-4060, all incorporated herein by reference.

[1082] Completely human antibodies can be produced using transgenic mice which are incapable of expressing endogenous immunoglobulin heavy and light chains genes, but which can express human heavy and light chain genes. For an overview of this technology for producing human antibodies, see Lonberg and Huszar (1995) Int. Rev. Immunol. 13:65-93). For a detailed discussion of this technology for producing human antibodies and human monoclonal antibodies and protocols for producing such antibodies, see, e.g., U.S. Pat. No. 5,625,126; U.S. Pat. No. 5,633,425; U.S. Pat. No. 5,569,825; U.S. Pat. No. 5,661,016; and U.S. Pat. No. 5,545,806. In addition, companies such as Abgenix, Inc. (Freemont, Calif.), can be engaged to provide human antibodies directed against a selected antigen using technology similar to that described above.

[1083] An antibody directed against a fusion polypeptide described herein (e.g., a monoclonal antibody) can be used to isolate the polypeptide by standard techniques, such as affinity chromatography or immunoprecipitation. Moreover, such an antibody can be used to detect the marker (e.g., in a cellular lysate or cell supernatant) in order to evaluate the level and pattern of expression of the marker. Detection can be facilitated by coupling the antibody to a detectable substance. Examples of detectable substances include, but are not limited to, various enzymes, prosthetic groups, fluorescent materials, luminescent materials, bioluminescent materials, and radioactive materials. Examples of suitable enzymes include, but are not limited to, horseradish peroxidase, alkaline phosphatase, β-galactosidase, or acetylcholinesterase; examples of suitable prosthetic group complexes include, but are not limited to, streptavidin/biotin and avidin/biotin; examples of suitable fluorescent materials include, but are not limited to, umbelliferone, fluorescein, fluorescein isothiocyanate, rhodamine, dichlorotriazinylamine fluorescein, dansyl chloride or phycoerythrin; an example of a luminescent material includes, but is not limited to, luminol; examples of bioluminescent materials include, but are not limited to, luciferase, luciferin, and aequorin, and examples of suitable radioactive materials include, but are not limited to, ¹²⁵I, ¹³¹I, ³⁵S or ³H.

[1084] An antibody directed against a fusion polypeptide described herein, can also be used diagnostically to monitor protein levels in tissues or body fluids (e.g., in a tumor cell-containing body fluid) as part of a clinical testing procedure, e.g., to, for example, determine the efficacy of a given treatment regimen.

### Antigens and Vaccines

[1085] Embodiments featured in the invention include preparations, e.g., antigenic preparations, of the entire fusion or a fragment thereof, e.g., a fragment capable of raising antibodies specific to the fusion protein, e.g., a fusion junction containing fragment (collectively referred to herein as a “fusion-specific polypeptides” or FSP). The preparation can include an adjuvant or other component.

[1086] An FSP can be used as an antigen or vaccine. For example, an FSP can be used as an antigen to immunize an animal, e.g., a rodent, e.g., a mouse or rat, rabbit, horse, goat, dog, or non-human primate, to obtain antibodies, e.g., fusion protein specific antibodies. In an embodiment a fusion specific antibody molecule is an antibody molecule described herein, e.g., a polyclonal. In other embodiments a fusion specific antibody molecule is monospecific, e.g., monoclonal, human, humanized, chimeric or other monospecific antibody molecule. An anti-fusion protein specific antibody molecule can be used to treat a subject having a cancer, e.g., a cancer described herein.

[1087] Embodiments featured include vaccine preparations that comprise an FSP capable of stimulating an immune response in a subject, e.g., by raising, in the subject, antibodies specific to the fusion protein. The vaccine preparation can include other components, e.g., an adjuvant. The vaccine preparations can be used to treat a subject having cancer, e.g., a cancer described herein.

### Rearrangement Based Cancer Vaccines

[1088] Embodiments featured in the invention include preparations of a fusion polypeptide described herein. The fusion polypeptide can be derived from, but is not limited to, any fusion molecule described herein.

[1089] A fusion junction polypeptide can be used as an antigen or vaccine, for the treatment of a disease. e.g., a cancer, e.g., a cancer described herein. For example, antigen presenting cells (APCs) derived from a patient with a disease, e.g., cancer, e.g., a cancer described herein; can be incubated with a fusion junction polypeptide, wherein the disease from which the patient's APCs are derived is known, has been determined, or is suspected of expressing the fusion molecule from which the fusion junction polypeptide is derived. In certain embodiments, the APCs are also incubated with one or more cytokines. In certain embodiments, the cytokine induces maturation of the APCs. In certain embodiments, the cytokine is one or more of GMCSF, TNF-alpha, IL-4, IL-2, IL-6, IL-7, IL-13, IL-15, HGF. In certain embodiments, the cytokine is GMCSF. The APCs are incubated with the fusion polypeptide under conditions which allow the APCs to uptake or endocytose the fusion polypeptide, and process the polypeptide for presentation on a cell surface molecule, e.g., major histocompatibility class MHC class I molecules. The cell culture conditions are known to one of skill in the art. The APCs can then be infused back into the same patient from whom the cells were derived.

[1090] In certain embodiments the APCs are purified prior to incubation with a fusion polypeptide. In certain embodiments, the APCs are dendritic cells. In certain embodiments, the APCs include one or more of dendritic cells, macrophages, and B cells. In certain embodiments, the APCs are incubated with one, two, three, four, or more fusion polypeptides.

[1091] In certain embodiments, the disclosure includes preparations of or a vaccine preparation of mature APCs which have been incubated with a fusion polypeptide described herein.

[1092] In certain embodiments, the method includes determining or acquiring a determination of whether a patient expresses a fusion molecule described herein. In certain embodiments, the method includes selecting a fusion polypeptide based on the determination of whether a patient expresses a fusion molecule described herein. In some embodiments, the method further comprises the incubation of APCs derived from the patient with the selected fusion polypeptide. In some embodiments, the method further comprises the infusion of the APCs back into the patient from which they were derived.

### Expression Vectors, Host Cells and Recombinant Cells

[1093] In another aspect, the invention includes vectors (e.g., expression vectors), containing a nucleic acid encoding a fusion polypeptide described herein. As used herein, the term “vector” refers to a nucleic acid molecule capable of transporting another nucleic acid to which it has been linked and can include a plasmid, cosmid or viral vector. The vector can be capable of autonomous replication or it can integrate into a host DNA. Viral vectors include, e.g., replication defective retroviruses, adenoviruses and adeno-associated viruses.

[1094] A vector can include a fusion nucleic acid in a form suitable for expression of the nucleic acid in a host cell. Preferably the recombinant expression vector includes one or more regulatory sequences operatively linked to the nucleic acid sequence to be expressed. The term “regulatory sequence” includes promoters, enhancers and other expression control elements (e.g., polyadenylation signals). Regulatory sequences include those which direct constitutive expression of a nucleotide sequence, as well as tissue-specific regulatory and/or inducible sequences. The design of the expression vector can depend on such factors as the choice of the host cell to be transformed, the level of expression of protein desired, and the like. The expression vectors can be introduced into host cells to thereby produce a fusion polypeptide, including fusion proteins or polypeptides encoded by nucleic acids as described herein, mutant forms thereof, and the like).

[1095] The term “recombinant host cell” (or simply “host cell” or “recombinant cell”), as used herein, is intended to refer to a cell into which a recombinant expression vector has been introduced. It should be understood that such terms are intended to refer not only to the particular subject cell, but to the progeny of such a cell. Because certain modifications may occur in succeeding generations due to either mutation or environmental influences, such progeny may not, in fact, be identical to the parent cell, but are still included within the scope of the term “host cell” as used herein.

[1096] The recombinant expression vectors can be designed for expression of a fusion polypeptide (e.g., a fusion described herein) in prokaryotic or eukaryotic cells. For example, polypeptides featured in the invention can be expressed in E. coli, insect cells (e.g., using baculovirus expression vectors), yeast cells or mammalian cells. Suitable host cells are discussed further in Goeddel, (1990) Gene Expression Technology: Methods in Enzymology 185, Academic Press, San Diego, Calif., incorporated herein by reference. Alternatively, the recombinant expression vector can be transcribed and translated in vitro, for example using T7 promoter regulatory sequences and T7 polymerase.

[1097] Expression of proteins in prokaryotes is most often carried out in E. coli with vectors containing constitutive or inducible promoters directing the expression of either fusion or non-fusion proteins. Fusion vectors add a number of amino acids to a protein encoded therein, usually to the amino terminus of the recombinant protein. Such fusion vectors typically serve three purposes: 1) to increase expression of recombinant protein; 2) to increase the solubility of the recombinant protein; and 3) to aid in the purification of the recombinant protein by acting as a ligand in affinity purification. Often, a proteolytic cleavage site is introduced at the junction of the fusion moiety and the recombinant protein to enable separation of the recombinant protein from the fusion moiety subsequent to purification of the fusion protein. Such enzymes, and their cognate recognition sequences, include Factor Xa, thrombin and enterokinase. Typical fusion expression vectors include pGEX (Pharmacia Biotech Inc; Smith, D. B, and Johnson, K. S. (1988) Gene 67:31-40), pMAL (New England Biolabs, Beverly, Mass.) and pRIT5 (Pharmacia, Piscataway, N.J.) which fuse glutathione S-transferase (GST), maltose E binding protein, or protein A, respectively, to the target recombinant protein.

[1098] Purified fusion polypeptides described herein can be used in activity assays (e.g., direct assays or competitive assays described in detail below), or to generate antibodies specific for fusion polypeptides described herein.

[1099] To maximize recombinant protein expression in E. coli is to express the protein in a host bacteria with an impaired capacity to proteolytically cleave the recombinant protein (Gottesman, S., (1990) Gene Expression Technology: Methods in Enzymology 185, Academic Press, San Diego, Calif. 119-128). Another strategy is to alter the nucleic acid sequence of the nucleic acid to be inserted into an expression vector so that the individual codons for each amino acid are those preferentially utilized in E. coli (Wada et al., (1992) Nucleic Acids Res. 20:2111-2118). Such alteration of nucleic acid sequences can be carried out by standard DNA synthesis techniques.

[1100] The fusion polypeptide expression vector can be a yeast expression vector, a vector for expression in insect cells, e.g., a baculovirus expression vector or a vector suitable for expression in mammalian cells.

[1101] When used in mammalian cells, the expression vector's control functions can be provided by viral regulatory elements. For example, commonly used promoters are derived from polyoma, Adenovirus 2, cytomegalovirus and Simian Virus 40.

[1102] In another embodiment, the promoter is an inducible promoter, e.g., a promoter regulated by a steroid hormone, by a polypeptide hormone (e.g., by means of a signal transduction pathway), or by a heterologous polypeptide (e.g., the tetracycline-inducible systems, “Tet-On” and “Tet-Off”; see, e.g., Clontech Inc., CA, Gossen and Bujard (1992) Proc. Natl. Acad. Sci. USA 89:5547, and Paillard (1989) Human Gene Therapy 9:983).

[1103] In another embodiment, the recombinant mammalian expression vector is capable of directing expression of the nucleic acid preferentially in a particular cell type (e.g., tissue-specific regulatory elements are used to express the nucleic acid). Non-limiting examples of suitable tissue-specific promoters include the albumin promoter (liver-specific; Pinkert et al. (1987) Genes Dev. 1:268-277), lymphoid-specific promoters (Calame and Eaton (1988) Adv. Immunol. 43:235-275), in particular promoters of T cell receptors (Winoto and Baltimore (1989) EMBO J. 8:729-733) and immunoglobulins (Banerji et al. (1983) Cell 33:729-740; Queen and Baltimore (1983) Cell 33:741-748), neuron-specific promoters (e.g., the neurofilament promoter; Byrne and Ruddle (1989) Proc. Natl. Acad. Sci. USA 86:5473-5477), pancreas-specific promoters (Edlund et al. (1985) Science 230:912-916), and mammary gland-specific promoters (e.g., milk whey promoter; U.S. Pat. No. 4,873,316 and European Application Publication No. 264,166). Developmentally-regulated promoters are also encompassed, for example, the murine hox promoters (Kessel and Gruss (1990) Science 249:374-379) and the fetoprotein promoter (Campes and Tilghman (1989) Genes Dev. 3:537-546), all incorporated herein by reference.

[1104] The invention further provides a recombinant expression vector comprising a DNA molecule featured in the invention cloned into the expression vector in an antisense orientation. Regulatory sequences (e.g., viral promoters and/or enhancers) operatively linked to a nucleic acid cloned in the antisense orientation can be chosen which direct the constitutive, tissue specific or cell type specific expression of antisense RNA in a variety of cell types. The antisense expression vector can be in the form of a recombinant plasmid, phagemid or attenuated virus.

[1105] Another aspect the invention provides a host cell which includes a nucleic acid molecule described herein, e.g., a fusion nucleic acid molecule described herein within a recombinant expression vector or a fusion nucleic acid molecule described herein containing sequences which allow it to homologous recombination into a specific site of the host cell's genome.

[1106] A host cell can be any prokaryotic or eukaryotic cell. For example, a fusion polypeptide can be expressed in bacterial cells (such as E. coli), insect cells, yeast or mammalian cells (such as Chinese hamster ovary cells (CHO) or COS cells, e.g., COS-7 cells, CV-1 origin SV40 cells; Gluzman (1981) Cell 23:175-182). Other suitable host cells are known to those skilled in the art.

[1107] Vector DNA can be introduced into host cells via conventional transformation or transfection techniques. As used herein, the terms “transformation” and “transfection” are intended to refer to a variety of art-recognized techniques for introducing foreign nucleic acid (e.g., DNA) into a host cell, including calcium phosphate or calcium chloride co-precipitation, DEAE-dextran-mediated transfection, lipofection, or electroporation.

[1108] A host cell can be used to produce (e.g., express) a fusion polypeptide (e.g., a fusion molecule described herein). Accordingly, the invention further provides methods for producing a fusion polypeptide using the host cells. In one embodiment, the method includes culturing the host cell (into which a recombinant expression vector encoding a polypeptide has been introduced) in a suitable medium such that the fusion polypeptide is produced. In another embodiment, the method further includes isolating a fusion polypeptide from the medium or the host cell.

[1109] In another aspect, the invention features, a cell or purified preparation of cells which include a fusion molecule described herein transgene, or which otherwise misexpress the fusion. For example, a cell or purified preparation of cells which include a FGFR3-TACC3 fusion transgene, or which otherwise misexpress FGFR3-TACC3 fusion.

[1110] The cell preparation can consist of human or non-human cells, e.g., rodent cells, e.g., mouse or rat cells, rabbit cells, or pig cells. In embodiments, the cell or cells include a fusion transgene, e.g., a heterologous form of a fusion described herein, e.g., a gene derived from humans (in the case of a non-human cell) or a fusion transgene, e.g., a heterologous form of a fusion described herein. The fusion transgene can be misexpressed, e.g., overexpressed or under expressed. In other preferred embodiments, the cell or cells include a gene that mis-expresses an endogenous fusion, e.g., a gene the expression of which is disrupted, e.g., a knockout. Such cells can serve as a model for studying disorders that are related to mutated or misexpressed fusion alleles (e.g., cancers) or for use in drug screening, as described herein.

### Therapeutic Methods

[1111] Alternatively, or in combination with the methods described herein, the invention features a method of treating a neoplasm, a cancer or a tumor harboring a fusion moelcule described herein. The methods include administering an anti-cancer agent, e.g., a kinase inhibitor, alone or in combination, e.g., in combination with other chemotherapeutic agents or procedures, in an amount sufficient to reduce or inhibit the tumor cell growth, and/or treat or prevent the cancer(s), in the subject.

[1112] “Treat,” “treatment,” and other forms of this word refer to the administration of a kinase inhibitor, alone or in combination with a second agent to impede growth of a cancer, to cause a cancer to shrink by weight or volume, to extend the expected survival time of the subject and or time to progression of the tumor or the like. In those subjects, treatment can include, but is not limited to, inhibiting tumor growth, reducing tumor mass, reducing size or number of metastatic lesions, inhibiting the development of new metastatic lesions, prolonged survival, prolonged progression-free survival, prolonged time to progression, and/or enhanced quality of life.

[1113] As used herein, unless otherwise specified, the terms “prevent,” “preventing” and “prevention” contemplate an action that occurs before a subject begins to suffer from the re-growth of the cancer and/or which inhibits or reduces the severity of the cancer.

[1114] As used herein, and unless otherwise specified, a “therapeutically effective amount” of a compound is an amount sufficient to provide a therapeutic benefit in the treatment or management of the cancer, or to delay or minimize one or more symptoms associated with the cancer. A therapeutically effective amount of a compound means an amount of therapeutic agent, alone or in combination with other therapeutic agents, which provides a therapeutic benefit in the treatment or management of the cancer. The term “therapeutically effective amount” can encompass an amount that improves overall therapy, reduces or avoids symptoms or causes of the cancer, or enhances the therapeutic efficacy of another therapeutic agent.

[1115] As used herein, and unless otherwise specified, a “prophylactically effective amount” of a compound is an amount sufficient to prevent re-growth of the cancer, or one or more symptoms associated with the cancer, or prevent its recurrence. A prophylactically effective amount of a compound means an amount of the compound, alone or in combination with other therapeutic agents, which provides a prophylactic benefit in the prevention of the cancer. The term “prophylactically effective amount” can encompass an amount that improves overall prophylaxis or enhances the prophylactic efficacy of another prophylactic agent.

[1116] As used herein, the term “patient” or “subject” refers to an animal, typically a human (i.e., a male or female of any age group, e.g., a pediatric patient (e.g., infant, child, adolescent) or adult patient (e.g., young adult, middle-aged adult or senior adult) or other mammal, such as a primate (e.g., cynomolgus monkey, rhesus monkey); commercially relevant mammals such as cattle, pigs, horses, sheep, goats, cats, and/or dogs; and/or birds, including commercially relevant birds such as chickens, ducks, geese, and/or turkeys, that will be or has been the object of treatment, observation, and/or experiment. When the term is used in conjunction with administration of a compound or drug, then the patient has been the object of treatment, observation, and/or administration of the compound or drug.

[1117] In certain embodiments, the cancer includes, but is not limited to, a solid tumor, a soft tissue tumor, and a metastatic lesion (e.g., a cancer as described herein). In one embodiment, the cancer is chosen from lung adenocarcinoma, cervical adenocarcinoma, uterus endometrial adenocarcinoma, glioblastoma, melanoma (such as spitzoid or Spitz melanoma), spindle cell sarcoma, ameloblastic fibrosarcoma, adenocarcinoma, cholangiocarcinoma, urothelial (transitional cell) carcinoma, ovarian epithelial carcinoma, colorectal adenocarcinoma, breast carcinoma, prostate carcinoma, or pancreas ductal adenocarcinoma. In one embodiment, the cancer is chosen from a lung cancer, a pancreatic cancer, melanoma, a colorectal cancer, an esophageal-gastric cancer, a thyroid cancer, or an adenocarcinoma. In other embodiment, the lung cancer is chosen from one or more of the following: non-small cell lung cancer (NSCLC), small cell lung cancer (SCLC), squamous cell carcinoma (SCC), adenocarcinoma of the lung, bronchogenic carcinoma, or a combination thereof. In one embodiment, the lung cancer is NSCLC or SCC.

[1118] In other embodiments, the cancer is chosen from lung cancer, thyroid cancer, colorectal cancer, adenocarcinoma, melanoma, B cell cancer, breast cancer, bronchus cancer, cancer of the oral cavity or pharynx, cancer of hematological tissues, cervical cancer, colon cancer, esophageal cancer, esophageal-gastric cancer, gastric cancer, kidney cancer, liver cancer, multiple myeloma, ovarian cancer, pancreatic cancer, prostate cancer, salivary gland cancer, small bowel or appendix cancer, stomach cancer, testicular cancer, urinary bladder cancer, uterine or endometrial cancer, inflammatory myofibroblastic tumors, gastrointestinal stromal tumor (GIST), and the like.

[1119] In certain embodiments, the neoplasm or neoplastic cell is a benign, pre-malignant, malignant (cancer) or metastasis.

### Kinase Inhibitors

[1120] In one embodiment, the anti-cancer agent is a kinase inhibitor. For example, the kinase inhibitor is a multi-kinase inhibitor or a specific inhibitor. Exemplary kinase inhibitors include, but are not limited to, alisertib (MLN8237), axitinib (AG013736), bosutinib (SKI-606), cediranib (RECENTIN™, AZD2171), crizotinib (PF-02341066, Xalkori), dasatinib (SPRYCEL®, BMS-354825), deforolimus (AP23573/MK-8669), dovitinib lactate (TK1258, CHIR-258), enzastaurin (LY317615), everolimus (RAD001), erlotinib (TARCEVA®), fostamatinib (FosD/R788), gefitinib (IRESSA®), imatinib (Gleevec®, CGP57148B, STI-571), ibrutinib (PCI-32765), lapatinib (TYKERB®, TYVERB®), lestaurtinib (CEP-701), neratinib (HKI-272), nilotinib (TASIGNA®), pacritinib (SB1518), ponatinib (Iclusig), semaxanib (semaxinib, SU5416), sorafenib (NEXAVAR®), sunitinib (SUTENT®, SU11248), temsirolimus (CCI-779/Torisel), tipifarnib (Zamestra, R115777), tivozanib (AV-951), toceranib (PALLADIA®), vandetanib, vatalanib (PTK787, PTK/ZK), ENMD-2076, PCI-32765, AC220, BIBW 2992 (TOVOK™), SGX523, PF-04217903, PF-02341066, PF-299804, BMS-777607, ABT-869, MP470, BIBF 1120 (VARGATEF®), AP24534, JNJ-26483327, MGCD265, DCC-2036, BMS-690154, CEP-11981, OSI-930, MM-121, XL-184, XL-647, LDK378, GS-1101 (CAL-101), MK-2206, perifosine, LGX818, BMS-908662, PLX3603, RAF265, RO5185426, trametinib, cabozantinib, AZ64, AP26113, X-276, X-376, X-396, CH5424802 (AF-802), GSK1838705, ASP3026, PHA-E429, CRL151104A and XL228. Table 10 describes some kinase inhibitors against BRAF, BRAF, NTRK1, ALK and ROS1.

[1121] For these inhibitors, a pharmaceutically effective dose amount is that dose required to prevent, inhibit the occurrence, or treat (alleviate a symptom to some extent, preferably all of the symptoms) of a disease state. The pharmaceutically effective dose depends on the type of disease, the composition used, the route of administration, the type of mammal being treated, the physical characteristics of the specific mammal under consideration, concurrent medication, and other factors that those skilled in the medical arts will recognize. Generally, an amount between 0.1 mg/kg and 100 mg/kg body weight/day of active ingredients (i.e., kinase inhibitors) is administered.

[1122] Dosage levels of the order of from about 0.1 mg to about 140 mg per kilogram of body weight per day are useful in the treatment of the above-indicated conditions (about 0.5 mg to about 7 g per patient per day). The amount of active ingredient that can be combined with the carrier materials to produce a single dosage form varies depending upon the host treated and the particular mode of administration. Dosage unit forms generally contain between from about 1 mg to about 500 mg of an active ingredient. It is understood that the specific dose level for any particular patient depends upon a variety of factors including the activity of the specific compound employed, the age, body weight, general health, sex, diet, time of administration, route of administration, and rate of excretion, drug combination and the severity of the particular disease undergoing therapy.

[1123] For example, the dosing of the antitumor efficacy of crizotinib was initially demonstrated to be 250 mg, orally, given twice a day, based on results from the initial phase I dose escalation studies for a variety of cancers (Sahu, A. et al., South Asian J Cancer. 2013 2(2): 91-97). Another kinase inhibitor, vemurafenib has a maximum tolerated dose of 60 mg twice daily as established by a phase I trial and is shown to be effective against melanoma patients at this dose (Chapman, P. et al, N Engl J Med. 2011; 364(26): 2507-2516).

TABLE 10
Kinase inhibitors against certain tyrosine
and serine/threonine protein kinases

| Kinase | Inhibitors |
|---|---|
| BRAF | vemurafenib (also known as RG7204; or PLX4032; or Zelboraf); |
| | GDC-0879; PLX-4702; AZ628; dabrafenib (GSK2118346); |
| | LGX818; BMS-908662, PLX3603, RAF265, RO5185426, |
| | trametinib; or Sorafenib Tosylate |
| RET | pyrazolo-pyrimidines, e.g., PP1 and PP2; indocarbazole |
| | derivatives, e.g., CEP-701 and CEP-751; 2-indolinone, e.g., |
| | RPI-1; and quinazoline, e.g., ZD6474; or TG101209; |
| | vandetanib, cabozantinib |
| NTRK1 | lestaurtinib (CEP-701); AZ-23; indenopyrrolocarboazole |
| | 12a; oxindole 3; isothiazole 5n thiazole 20h; |
| | dasatinib; AZ64 |
| ALK | TAE-684 (also referred to herein as “NVP-TAE694”), |
| | PF02341066 (also referred to herein as “crizotinib” or |
| | “1066”), AF-802, LDK-378, ASP-3026, CEP-37440, |
| | CEP-28122, CEP-108050, MK-2206, perifosine, sorafertib and |
| | AP26113. Additional examples of AL kinase inhibitors are |
| | described in examples 3-39 of WO 2005016894 by Garcia- |
| | Echeverria C, et al. |
| ROS1 | Ganetespib; Crizotinib; TAE684; AP26113, X-276, X-376, |
| | X-396, CH5424802 (AF-802), GSK1838705, ASP3026, |
| | PHA-E429, CRL151104A Additional examples of kinase |
| | inhibitors are described in de la Bellacasa R. P. et al, |
| | Transl Lung Cancer Res 2013; 2(2): 72-86. |

[1124] In other embodiments, the anti-cancer agent is a fusion antagonist inhibits the expression of nucleic acid encoding a fusion described herein. Examples of such fusion antagonists include nucleic acid molecules, for example, antisense molecules, ribozymes, RNAi, triple helix molecules that hybridize to a nucleic acid encoding a fusion described herein, or a transcription regulatory region, and blocks or reduces mRNA expression of a fusion described herein.

[1125] In other embodiments, the kinase inhibitor is administered in combination with a second therapeutic agent or a different therapeutic modality, e.g., anti-cancer agents, and/or in combination with surgical and/or radiation procedures.

[1126] By “in combination with,” it is not intended to imply that the therapy or the therapeutic agents must be administered at the same time and/or formulated for delivery together, although these methods of delivery are within the scope of the invention. The pharmaceutical compositions can be administered concurrently with, prior to, or subsequent to, one or more other additional therapies or therapeutic agents. In general, each agent will be administered at a dose and/or on a time schedule determined for that agent. In will further be appreciated that the additional therapeutic agent utilized in this combination can be administered together in a single composition or administered separately in different compositions. The particular combination to employ in a regimen will take into account compatibility of the inventive pharmaceutical composition with the additional therapeutically active agent and/or the desired therapeutic effect to be achieved.

[1127] For example, the second therapeutic agent can be a cytotoxic or a cytostatic agent. Exemplary cytotoxic agents include antimicrotubule agents, topoisomerase inhibitors, or taxanes, antimetabolites, mitotic inhibitors, alkylating agents, intercalating agents, agents capable of interfering with a signal transduction pathway, agents that promote apoptosis and radiation. In yet other embodiments, the methods can be used in combination with immunomodulatory agents, e.g., IL-1, 2, 4, 6, or 12, or interferon alpha or gamma, or immune cell growth factors such as GM-CSF.

[1128] Anti-cancer agents, e.g., kinase inhibitors, used in therapeutic methods can be evaluated using the screening assays described herein. In one embodiment, the anti-cancer agents are evaluated in a cell-free system, e.g., a cell lysate or in a reconstituted system. In other embodiments, the anti-cancer agents are evaluated in a cell in culture, e.g., a cell expressing fusion molecule described herein (e.g., a mammalian cell, a tumor cell or cell line, a recombinant cell). In yet other embodiments, the anti-cancer agents are evaluated cell in vivo (a fusion molecule-expressing cell present in a subject, e.g., an animal subject (e.g., an in vivo animal model).

[1129] Exemplary parameters evaluated include one or more of:

[1130] (i) a change in binding activity, e.g., direct binding of the candidate agent to a fusion polypeptide described herein; a binding competition between a known ligand and the candidate agent to a fusion polypeptide described herein;

[1131] (ii) a change in kinase activity, e.g., phosphorylation levels of a fusion polypeptide described herein (e.g., an increased or decreased autophosphorylation); or a change in phosphorylation of a target of an kinase;

[1132] (iii) a change in an activity of a cell containing a fusion described herein (e.g., a tumor cell or a recombinant cell), e.g., a change in proliferation, morphology or tumorigenicity of the cell;

[1133] (iv) a change in tumor present in an animal subject, e.g., size, appearance, proliferation, of the tumor; or

[1134] (v) a change in the level, e.g., expression level, of a fusion polypeptide described herein or nucleic acid molecule described herein.

[1135] In one embodiment, a change in a cell free assay in the presence of a candidate agent is evaluated. For example, an activity of a fusion molecule described herein, or interaction of a fusion molecule described herein with a downstream ligand can be detected.

[1136] In other embodiments, a change in an activity of a cell is detected in a cell in culture, e.g., a cell expressing a fusion molecule described herein (e.g., a mammalian cell, a tumor cell or cell line, a recombinant cell). In one embodiment, the cell is a recombinant cell that is modified to express a fusion nucleic acid described herein, e.g., is a recombinant cell transfected with a fusion nucleic acid described herein. The transfected cell can show a change in response to the expressed fusion molecule described herein, e.g., increased proliferation, changes in morphology, increased tumorigenicity, and/or acquired a transformed phenotype. A change in any of the activities of the cell, e.g., the recombinant cell, in the presence of the candidate agent can be detected. For example, a decrease in one or more of: proliferation, tumorigenicity, transformed morphology, in the presence of the candidate agent can be indicative of an inhibitor of a fusion molecule described herein. In other embodiments, a change in binding activity or phosphorylation as described herein is detected.

[1137] In yet other embodiment a change in a tumor present in an animal subject (e.g., an in vivo animal model) is detected. In one embodiment, the animal model is a tumor containing animal or a xenograft comprising cells expressing a fusion molecule described herein (e.g., tumorigenic cells expressing a fusion molecule described herein). The anti-cancer agents can be administered to the animal subject and a change in the tumor is detected. In one embodiment, the change in the tumor includes one or more of a tumor growth, tumor size, tumor burden, survival, is evaluated. A decrease in one or more of tumor growth, tumor size, tumor burden, or an increased survival is indicative that the candidate agent is an inhibitor.

[1138] Therapeutic compositions may include a pharmaceutically effective amount of the desired compounds in a pharmaceutically acceptable carrier or diluent. Acceptable carriers or diluents for therapeutic use are well known in the pharmaceutical art, and are described, for example, in REMINGTON'S PHARMACEUTICAL SCIENCES, Mack Publishing Co. (A. R. Gennaro, Ed. 1985). For example, preservatives, stabilizers, dyes and flavoring agents can be provided. These include sodium benzoate, sorbic acid and esters of p-hydroxybenzoic acid. In addition, antioxidants and suspending agents can be used.

[1139] A pharmaceutically effective dose is that dose required to prevent, inhibit the occurrence, or treat (alleviate a symptom to some extent, preferably all of the symptoms) of a disease state. The pharmaceutically effective dose depends on the type of disease, the composition used, the route of administration, the type of mammal being treated, the physical characteristics of the specific mammal under consideration, concurrent medication, and other factors that those skilled in the medical arts will recognize. Generally, an amount between 0.1 mg/kg and 100 mg/kg body weight/day of active ingredients is administered dependent upon potency of the negatively charged polymer.

[1140] Dosage levels of the order of from about 0.1 mg to about 140 mg per kilogram of body weight per day are useful in the treatment of the above-indicated conditions (about 0.5 mg to about 7 g per patient per day). The amount of active ingredient that can be combined with the carrier materials to produce a single dosage form varies depending upon the host treated and the particular mode of administration. Dosage unit forms generally contain between from about 1 mg to about 500 mg of an active ingredient. It is understood that the specific dose level for any particular patient depends upon a variety of factors including the activity of the specific compound employed, the age, body weight, general health, sex, diet, time of administration, route of administration, and rate of excretion, drug combination and the severity of the particular disease undergoing therapy.

[1141] For administration to non-human animals, the composition can also be added to the animal feed or drinking water. It can be convenient to formulate the animal feed and drinking water compositions so that the animal takes in a therapeutically appropriate quantity of the composition along with its diet. It can also be convenient to present the composition as a premix for addition to the feed or drinking water.

[1142] An inhibiting therapeutic against ROS1, ALK, BRAF, RET, or NTRK1 useful in the practice of the invention may comprise a single compound as described above, or a combination of multiple compounds, whether in the same class of inhibitor (i.e. antibody inhibitor), or in different classes (i.e., antibody inhibitors and small-molecule inhibitors). Such combination of compounds may increase the overall therapeutic effect in inhibiting the progression of a fusion protein-expressing cancer. For example, the therapeutic composition may a small molecule inhibitor, or in combination with other inhibitors targeting ROS1, ALK, BRAF, RET, or NTRK1 activity and/or other small molecule inhibitors. The therapeutic composition may also comprise one or more non-specific chemotherapeutic agent in addition to one or more targeted inhibitor. Such combinations have recently been shown to provide a synergistic tumor killing effect in many cancers. The screening methods and assays are described in more detail herein below.

### Screening Methods

[1143] In another aspect, the invention features a method, or assay, for screening for agents that modulate, e.g., inhibit, the expression or activity of a fusion molecule described herein. The method includes contacting a fusion molecule described herein, or a cell expressing a fusion molecule described herein, with a candidate agent; and detecting a change in a parameter associated with a fusion molecule described herein, e.g., a change in the expression or an activity of the fusion molecule described herein. The method can, optionally, include comparing the treated parameter to a reference value, e.g., a control sample (e.g., comparing a parameter obtained from a sample with the candidate agent to a parameter obtained from a sample without the candidate agent). In one embodiment, if a decrease in expression or activity of the fusion molecule described herein is detected, the candidate agent is identified as an inhibitor. In another embodiment, if an increase in expression or activity of the fusion molecule described herein is detected, the candidate agent is identified as an activator. In certain embodiments, the fusion molecule described herein is a nucleic acid molecule or a polypeptide as described herein.

[1144] In one embodiment, the contacting step is effected in a cell-free system, e.g., a cell lysate or in a reconstituted system. In other embodiments, the contacting step is effected in a cell in culture, e.g., a cell expressing a fusion molecule described herein (e.g., a mammalian cell, a tumor cell or cell line, a recombinant cell). In yet other embodiments, the contacting step is effected in a cell in vivo (a fusion molecule described herein-expressing cell present in a subject, e.g., an animal subject (e.g., an in vivo animal model).

[1145] Exemplary parameters evaluated include one or more of:

[1146] (i) a change in binding activity, e.g., direct binding of the candidate agent to a fusion polypeptide described herein; a binding competition between a known ligand and the candidate agent to a fusion polypeptide described herein;

[1147] (ii) a change in kinase activity, e.g., phosphorylation levels of a fusion polypeptide described herein (e.g., an increased or decreased autophosphorylation); or a change in phosphorylation of a target of an kinase. In certain embodiments, a change in kinase activity, e.g., phosphorylation, is detected by any of Western blot (e.g., using an anti-BRAF or anti-CEP89 antibody; a phosphor-specific antibody, detecting a shift in the molecular weight of a CEP89-BRAF fusion polypeptide), mass spectrometry, immunoprecipitation, immunohistochemistry, immunomagnetic beads, among others;

[1148] (iii) a change in an activity of a cell containing a fusion molecule described herein (e.g., a tumor cell or a recombinant cell), e.g., a change in proliferation, morphology or tumorigenicity of the cell;

[1149] (iv) a change in tumor present in an animal subject, e.g., size, appearance, proliferation, of the tumor; or

[1150] (v) a change in the level, e.g., expression level, of a fusion polypeptide described herein or nucleic acid molecule described herein.

[1151] In one embodiment, a change in a cell free assay in the presence of a candidate agent is evaluated. For example, an activity of a fusion molecule described herein, or interaction of a fusion molecule described herein with a downstream ligand can be detected. In one embodiment, a fusion polypeptide described herein is contacted with a ligand, e.g., in solution, and a candidate agent is monitored for an ability to modulate, e.g., inhibit, an interaction, e.g., binding, between the fusion polypeptide described herein and the ligand. In one exemplary assay, purified fusion protein described herein is contacted with a ligand, e.g., in solution, and a candidate agent is monitored for an ability to inhibit interaction of the fusion protein with the ligand, or to inhibit phosphorylation of the ligand by the fusion protein. An effect on an interaction between the fusion protein and a ligand can be monitored by methods known in the art, such as by absorbance, and an effect on phosphorylation of the ligand can be assayed. e.g., by Western blot, immunoprecipitation, or immunomagnetic beads.

[1152] In other embodiments, a change in an activity of a cell is detected in a cell in culture, e.g., a cell expressing a fusion molecule described herein (e.g., a mammalian cell, a tumor cell or cell line, a recombinant cell). In one embodiment, the cell is a recombinant cell that is modified to express a fusion nucleic acid described herein, e.g., is a recombinant cell transfected with a fusion nucleic acid described herein. The transfected cell can show a change in response to the expressed fusion molecule, e.g., increased proliferation, changes in morphology, increased tumorigenicity, and/or acquired a transformed phenotype. A change in any of the activities of the cell, e.g., the recombinant cell, in the presence of the candidate agent can be detected. For example, a decrease in one or more of: proliferation, tumorigenicity, transformed morphology, in the presence of the candidate agent can be indicative of an inhibitor of a fusion molecule described herein. In other embodiments, a change in binding activity or phosphorylation as described herein is detected.

[1153] In an exemplary cell-based assay, a nucleic acid comprising a fusion molecule described herein can be expressed in a cell, such as a cell (e.g., a mammalian cell) in culture. The cell containing a nucleic acid expressing the fusion molecule can be contacted with a candidate agent, and the cell is monitored for an effect of the candidate agent. A candidate agent that causes decreased cell proliferation or cell death can be determined to be a candidate for treating a tumor (e.g., a cancer) that carries a fusion described herein.

[1154] In one embodiment, a cell containing a nucleic acid expressing a fusion molecule described herein can be monitored for expression of the fusion protein. Protein expression can be monitored by methods known in the art, such as by, e.g., mass spectrometry (e.g., tandem mass spectrometry), a reporter assay (e.g., a fluorescence-based assay), Western blot, and immunohistochemistry. By one method, decreased fusion expression is detected. A candidate agent that causes decreased expression of the fusion protein as compared to a cell that does not contain the nucleic acid fusion can be determined to be a candidate for treating a tumor (e.g., a cancer) that carries a fusion described herein.

[1155] A cell containing a nucleic acid expressing a fusion molecule described herein can be monitored for altered kinase activity. Kinase activity can be assayed by measuring the effect of a candidate agent on a known kinase target protein.

[1156] In yet other embodiment a change in a tumor present in an animal subject (e.g., an in vivo animal model) is detected. In one embodiment, the animal model is a tumor containing animal or a xenograft comprising cells expressing a fusion molecule described herein (e.g., tumorigenic cells expressing a fusion molecule described herein). The candidate agent can be administered to the animal subject and a change in the tumor is detected. In one embodiment, the change in the tumor includes one or more of a tumor growth, tumor size, tumor burden, survival, is evaluated. A decrease in one or more of tumor growth, tumor size, tumor burden, or an increased survival is indicative that the candidate agent is an inhibitor.

[1157] In one exemplary animal model, a xenograft is created by injecting cells into mouse. A candidate agent is administered to the mouse, e.g., by injection (such as subcutaneous, intraperitoneal, or tail vein injection, or by injection directly into the tumor) or oral delivery, and the tumor is observed to determine an effect of the candidate anti-cancer agent. The health of the animal is also monitored, such as to determine if an animal treated with a candidate agent survives longer. A candidate agent that causes growth of the tumor to slow or stop, or causes the tumor to shrink in size, or causes decreased tumor burden, or increases survival time, can be considered to be a candidate for treating a tumor (e.g., a cancer) that carries a fusion described herein.

[1158] In another exemplary animal assay, cells expressing a fusion described herein are injected into the tail vein. e.g., of a mouse, to induce metastasis. A candidate agent is administered to the mouse, e.g., by injection (such as subcutaneous, intraperitoneal, or tail vein injection, or by injection directly into the tumor) or oral delivery, and the tumor is observed to determine an effect of the candidate anti-cancer agent. A candidate agent that inhibits or prevents or reduces metastasis, or increases survival time, can be considered to be a candidate for treating a tumor (e.g., a cancer) that carries a fusion described herein.

[1159] Cell proliferation can be measured by methods known in the art, such as PCNA (Proliferating cell nuclear antigen) assay, 5-bromodeoxyuridine (BrdUrd) incorporation, Ki-67 assay, mitochondrial respiration, or propidium iodide staining. Cells can also be measured for apoptosis, such as by use of a TUNEL (Terminal Deoxynucleotide Transferase dUTP Nick End Labeling) assay. Cells can also be assayed for presence of angiogenesis using methods known in the art, such as by measuring endothelial tube formation or by measuring the growth of blood vessels from subcutaneous tissue, such as into a solid gel of basement membrane.

[1160] In other embodiments, a change in expression of a fusion molecule described herein can be monitored by detecting the nucleic acid or protein levels, e.g., using the methods described herein.

[1161] In certain embodiments, the screening methods described herein can be repeated and/or combined. In one embodiment, a candidate agent that is evaluated in a cell-free or cell-based described herein can be further tested in an animal subject.

[1162] In one embodiment, the candidate agent is identified and re-tested in the same or a different assay. For example, a test compound is identified in an in vitro or cell-free system, and re-tested in an animal model or a cell-based assay. Any order or combination of assays can be used. For example, a high throughput assay can be used in combination with an animal model or tissue culture.

[1163] Candidate agents suitable for use in the screening assays described herein include, e.g., small molecule compounds, nucleic acids (e.g., siRNA, aptamers, short hairpin RNAs, antisense oligonucleotides, ribozymes, antagomirs, microRNA mimics or DNA, e.g., for gene therapy) or polypeptides, e.g., antibodies (e.g., full length antibodies or antigen-binding fragments thereof, Fab fragments, or scFv fragments). The candidate anti-cancer agents can be obtained from a library (e.g., a commercial library), or can be rationally designed, such as to target an active site in a functional domain (e.g., a kinase domain).

[1164] In other embodiments, the method, or assay, includes providing a step based on proximity-dependent signal generation, e.g., a two-hybrid assay that includes a first fusion protein (e.g., a fusion protein described herein), and a second fusion protein (e.g., a ligand), contacting the two-hybrid assay with a test compound, under conditions wherein said two hybrid assay detects a change in the formation and/or stability of the complex, e.g., the formation of the complex initiates transcription activation of a reporter gene.

[1165] In one non-limiting example, the three-dimensional structure of the active site of fusion molecule described herein is determined by crystallizing the complex formed by the fusion molecule and a known inhibitor. Rational drug design is then used to identify new test agents by making alterations in the structure of a known inhibitor or by designing small molecule compounds that bind to the active site of the fusion.

[1166] The candidate agents can be obtained using any of the numerous approaches in combinatorial library methods known in the art, including: biological libraries; peptoid libraries (libraries of molecules having the functionalities of peptides, but with a novel, non-peptide backbone which are resistant to enzymatic degradation but which nevertheless remain bioactive; see, e.g., Zuckermann. R. N. et al. (1994) J. Med. Chem. 37:2678-85); spatially addressable parallel solid phase or solution phase libraries; synthetic library methods requiring deconvolution; the ‘one-bead one-compound’ library method; and synthetic library methods using affinity chromatography selection. The biological library and peptoid library approaches are limited to peptide libraries, while the other four approaches are applicable to peptide, non-peptide oligomer or small molecule libraries of compounds (Lam (1997) Anticancer Drug Des. 12:145).

[1167] Examples of methods for the synthesis of molecular libraries can be found in the art, for example in: DeWitt et al. (1993) Proc. Natl. Acad. Sci. U.S.A. 90:6909; Erb et al. (1994) Proc. Natl. Acad. Sci. USA 91:11422; Zuckermann et al. (1994). J. Med. Chem. 37:2678; Cho et al. (1993) Science 261:1303; Carrell et al. (1994) Angew. Chem. Int. Ed. Engl. 33:2059; Carell et al. (1994) Angew. Chem. Int. Ed. Engl. 33:2061; and Gallop et al. (1994) J. Med. Chem. 37:1233.

[1168] Libraries of compounds may be presented in solution (e.g., Houghten (1992) Biotechniques 13:412-421), or on beads (Lam (1991) Nature 354:82-84), chips (Fodor (1993) Nature 364:555-556), bacteria (Ladner, U.S. Pat. No. 5,223,409), spores (Ladner U.S. Pat. No. 5,223,409), plasmids (Cull et al. (1992) Proc Natl Acad. Sci USA 89:1865-1869) or on phage (Scott and Smith (1990) Science 249:386-390; Devlin (1990) Science 249:404-406; Cwirla et al. (1990) Proc. Natl. Acad. Sci. 87:6378-6382; Felici (1991) J. Mol. Biol. 222:301-310; Ladner supra.).

[1169] The interaction between two molecules can also be detected, e.g., using fluorescence energy transfer (FET) (see, for example, Lakowicz et al., U.S. Pat. No. 5,631,169; Stavrianopoulos, et al., U.S. Pat. No. 4,868,103). A fluorophore label on the first, ‘donor’ molecule is selected such that its emitted fluorescent energy will be absorbed by a fluorescent label on a second, ‘acceptor’ molecule, which in turn is able to fluoresce due to the absorbed energy. Alternately, the ‘donor’ protein molecule may simply utilize the natural fluorescent energy of tryptophan residues. Labels are chosen that emit different wavelengths of light, such that the ‘acceptor’ molecule label may be differentiated from that of the ‘donor’. Since the efficiency of energy transfer between the labels is related to the distance separating the molecules, the spatial relationship between the molecules can be assessed. In a situation in which binding occurs between the molecules, the fluorescent emission of the ‘acceptor’ molecule label in the assay should be maximal. An FET binding event can be conveniently measured through standard fluorometric detection means known in the art (e.g., using a fluorimeter).

[1170] In another embodiment, determining the ability of the fusion protein to bind to a target molecule can be accomplished using real-time Biomolecular Interaction Analysis (BIA) (see, e.g., Sjolander, S. and Urbaniczky, C. (1991) Anal. Chem. 63:2338-2345 and Szabo et al. (1995) Curr. Opin. Struct. Biol. 5:699-705). “Surface plasmon resonance” or “BIA” detects biospecific interactions in real time, without labeling any of the interactants (e.g., BIAcore). Changes in the mass at the binding surface (indicative of a binding event) result in alterations of the refractive index of light near the surface (the optical phenomenon of surface plasmon resonance (SPR)), resulting in a detectable signal which can be used as an indication of real-time reactions between biological molecules.

### Nucleic Acid Inhibitors

[1171] In another embodiment, a fusion inhibitor inhibits the expression of a nucleic acid encoding a fusion described herein. Examples of such fusion inhibitors include nucleic acid molecules, for example, antisense molecules, dsRNA, siRNA, ribozymes, or triple helix molecules, which hybridize to a nucleic acid encoding a fusion described herein, or a transcription regulatory region, and blocks or reduces mRNA expression of the fusion. Accordingly, isolated nucleic acid molecules that are nucleic acid inhibitors, e.g., antisense, siRNA, RNAi, to a fusion-encoding nucleic acid molecule are provided.

### Antisense

[1172] In some embodiments, the nucleic acid fusion inhibitor is an antisense nucleic acid molecule. An “antisense” nucleic acid can include a nucleotide sequence which is complementary to a “sense” nucleic acid encoding a protein, e.g., complementary to the coding strand of a double-stranded cDNA molecule or complementary to an mRNA sequence. The antisense nucleic acid can be complementary to an entire fusion coding strand, or to only a portion thereof. In another embodiment, the antisense nucleic acid molecule is antisense to a “noncoding region” of the coding strand of a nucleotide sequence encoding fusion (e.g., the 5′ and 3′ untranslated regions). Anti-sense agents can include, for example, from about 8 to about 80 nucleobases (i.e., from about 8 to about 80 nucleotides), e.g., about 8 to about 50 nucleobases, or about 12 to about 30 nucleobases. Antisense compounds include ribozymes, external guide sequence (EGS) oligonucleotides (oligozymes), and other short catalytic RNAs or catalytic oligonucleotides which hybridize to the target nucleic acid and modulate its expression. Antisense compounds can include a stretch of at least eight consecutive nucleobases that are complementary to a sequence in the target gene. An oligonucleotide need not be 100% complementary to its target nucleic acid sequence to be specifically hybridizable. An oligonucleotide is specifically hybridizable when binding of the oligonucleotide to the target interferes with the normal function of the target molecule to cause a loss of utility, and there is a sufficient degree of complementarity to avoid non-specific binding of the oligonucleotide to non-target sequences under conditions in which specific binding is desired, i.e., under physiological conditions in the case of in vivo assays or therapeutic treatment or, in the case of in vitro assays, under conditions in which the assays are conducted.

[1173] Hybridization of antisense oligonucleotides with mRNA can interfere with one or more of the normal functions of mRNA. The functions of mRNA to be interfered with include all key functions such as, for example, translocation of the RNA to the site of protein translation, translation of protein from the RNA, splicing of the RNA to yield one or more mRNA species, and catalytic activity which may be engaged in by the RNA. Binding of specific protein(s) to the RNA may also be interfered with by antisense oligonucleotide hybridization to the RNA.

[1174] Exemplary antisense compounds include DNA or RNA sequences that specifically hybridize to the target nucleic acid, e.g., the mRNA encoding a fusion described herein. The complementary region can extend for between about 8 to about 80 nucleobases. The compounds can include one or more modified nucleobases. Modified nucleobases may include, e.g., 5-substituted pyrimidines such as 5-iodouracil, 5-iodocytosine, and C5-propynyl pyrimidines such as C5-propynylcytosine and C5-propynyluracil. Other suitable modified nucleobases include N⁴—(C₁-C₁₂) alkylaminocytosines and N⁴,N⁴—(C₁-C₁₂) dialkylaminocytosines. Modified nucleobases may also include 7-substituted-8-aza-7-deazapurines and 7-substituted-7-deazapurines such as, for example, 7-iodo-7-deazapurines, 7-cyano-7-deazapurines, 7-aminocarbonyl-7-deazapurines. Examples of these include 6-amino-7-iodo-7-deazapurines, 6-amino-7-cyano-7-deazapurines, 6-amino-7-aminocarbonyl-7-deazapurines, 2-amino-6-hydroxy-7-iodo-7-deazapurines, 2-amino-6-hydroxy-7-cyano-7-deazapurines, and 2-amino-6-hydroxy-7-aminocarbonyl-7-deazapurines. Furthermore, N⁶—(C₁-C₁₂) alkylaminopurines and N⁶,N⁶—(C₁-C₁₂) dialkylaminopurines, including N⁶-methylaminoadenine and N⁶,N⁶-dimethylaminoadenine, are also suitable modified nucleobases. Similarly, other 6-substituted purines including, for example, 6-thioguanine may constitute appropriate modified nucleobases. Other suitable nucleobases include 2-thiouracil, 8-bromoadenine, 8-bromoguanine, 2-fluoroadenine, and 2-fluoroguanine. Derivatives of any of the aforementioned modified nucleobases are also appropriate. Substituents of any of the preceding compounds may include C₁-C₃₀ alkyl, C₂-C₃a alkenyl, C₂-C₃₀ alkynyl, aryl, aralkyl, heteroaryl, halo, amino, amido, nitro, thio, sulfonyl, carboxyl, alkoxy, alkylcarbonyl, alkoxycarbonyl, and the like. Descriptions of other types of nucleic acid agents are also available. See, e.g., U.S. Pat. Nos. 4,987,071; 5,116,742; and 5,093,246; Woolf et al. (1992) Proc Natl Acad. Sci USA; Antisense RNA and DNA, D. A. Melton, Ed., Cold Spring Harbor Laboratory, Cold Spring Harbor, N.Y. (1988); 89:7305-9; Haselhoff and Gerlach (1988) Nature 334:585-59; Helene. C. (1991) Anticancer Drug Des. 6:569-84; Helene (1992) Ann. N. Y Acad. Sci. 660:27-36; and Maher (1992) Bioassays 14:807-15.

[1175] In yet another embodiment, the antisense nucleic acid molecule is an α-anomeric nucleic acid molecule. An α-anomeric nucleic acid molecule forms specific double-stranded hybrids with complementary RNA in which, contrary to the usual β-units, the strands run parallel to each other (Gaultier et al. (1987) Nucleic Acids. Res. 15:6625-6641). The antisense nucleic acid molecule can also comprise a 2′-o-methylribonucleotide (Inoue et al. (1987) Nucleic Acids Res. 15:6131-6148) or a chimeric RNA-DNA analogue (Inoue et al. (1987) FEBS Lett. 215:327-330).

[1176] The antisense nucleic acid molecules are typically administered to a subject (e.g., by direct injection at a tissue site), or generated in situ such that they hybridize with or bind to cellular mRNA and/or genomic DNA encoding a fusion described herein to thereby inhibit expression of the protein, e.g., by inhibiting transcription and/or translation. Alternatively, antisense nucleic acid molecules can be modified to target selected cells and then be administered systemically. For systemic administration, antisense molecules can be modified such that they specifically bind to receptors or antigens expressed on a selected cell surface, e.g., by linking the antisense nucleic acid molecules to peptides or antibodies which bind to cell surface receptors or antigens. The antisense nucleic acid molecules can also be delivered to cells using the vectors described herein. To achieve sufficient intracellular concentrations of the antisense molecules, vector constructs in which the antisense nucleic acid molecule is placed under the control of a strong pol II or pol III promoter are preferred.

### Ribozymes

[1177] In another embodiment, an antisense nucleic acid featured in the invention is a ribozyme. A ribozyme having specificity for a fusion-encoding nucleic acid can include one or more sequences complementary to the nucleotide sequence of a fusion cDNA disclosed herein, and a sequence having known catalytic sequence responsible for mRNA cleavage (see U.S. Pat. No. 5,093,246 or Haselhoff and Gerlach (1988) Nature 334:585-591). For example, a derivative of a Tetrahymena L-19 IVS RNA can be constructed in which the nucleotide sequence of the active site is complementary to the nucleotide sequence to be cleaved in a fusion-encoding mRNA. See, e.g., Cech et al. U.S. Pat. No. 4,987,071; and Cech et al. U.S. Pat. No. 5,116,742. Alternatively, fusion mRNA can be used to select a catalytic RNA having a specific ribonuclease activity from a pool of RNA molecules. See, e.g., Bartel, D, and Szostak, J. W. (1993) Science 261:1411-1418.

### Triple Helix Molecules

[1178] Inhibition of a fusion gene described herein can be accomplished by targeting nucleotide sequences complementary to the regulatory region of the fusion to form triple helical structures that prevent transcription of the fusion gene in target cells. See generally, Helene, C. (1991) Anticancer Drug Des. 6:569-84; Helene, C. i (1992) Ann. N.Y. Acad. Sci. 660:27-36; and Maher, L. J. (1992) Bioassays 14:807-15. The potential sequences that can be targeted for triple helix formation can be increased by creating a so-called “switchback” nucleic acid molecule. Switchback molecules are synthesized in an alternating 5′-3′,3′-5′ manner, such that they base pair with first one strand of a duplex and then the other, eliminating the necessity for a sizeable stretch of either purines or pyrimidines to be present on one strand of a duplex.

dsRNAs

[1179] In some embodiments, the nucleic acid fusion inhibitor is a dsRNA molecule, dsRNAs having a duplex structure of between about 20 and 23 base pairs, e.g., 21, base pairs are effective at inducing RNA interference (RNAi) (Elbashir et al., EMBO 2001, 20:6877-6888). However, others have found that shorter or longer RNA duplex structures can also be effective (Chu and Rana (2007) RNA 14:1714-1719; Kim et al. (2005) Nat Biotech 23:222-226).

[1180] In one embodiment, the dsRNA, is un-modified, and does not comprise, e.g., chemical modifications and/or conjugations known in the art or described herein. In another embodiment, the dsRNA, is chemically modified to enhance stability or other beneficial characteristics. The dsRNA can be synthesized and/or modified by methods well established in the art, such as those described in “Current protocols in nucleic acid chemistry,” Beaucage, S. L. et al. (Edrs.), John Wiley & Sons, Inc., New York, N.Y., USA, which is hereby incorporated herein by reference. While a target sequence of a dsRNA can be generally about 15-30 nucleotides in length, there is wide variation in the suitability of particular sequences in this range for directing cleavage of any given target RNA. Various software packages and the guidelines set out herein provide guidance for the identification of optimal target sequences for any given gene target, but an empirical approach can also be taken in which a “window” or “mask” of a given size (as a non-limiting example, 21 nucleotides) is literally or figuratively (including, e.g., in silico) placed on the target RNA sequence to identify sequences in the size range that can serve as target sequences. By moving the sequence “window” progressively one nucleotide upstream or downstream of an initial target sequence location, the next potential target sequence can be identified, until the complete set of possible sequences is identified for any given target size selected. This process, coupled with systematic synthesis and testing of the identified sequences (using assays as described herein or as known in the art) to identify those sequences that perform optimally can identify those RNA sequences that, when targeted with a dsRNA molecule, mediate the best inhibition of target gene expression. Thus, while the sequences identified herein represent effective target sequences, it is contemplated that further optimization of inhibition efficiency can be achieved by progressively “walking the window” one nucleotide upstream or downstream of the given sequences to identify sequences with equal or better inhibition characteristics.

[1181] In some embodiments, the nucleic acid fusion inhibitor is a siRNA molecule. siRNAs are small double stranded RNAs (dsRNAs) that optionally include overhangs. For example, the duplex region of an siRNA is about 18 to 25 nucleotides in length, e.g., about 19, 20, 21, 22, 23, or 24 nucleotides in length. Typically, the siRNA sequences are exactly complementary to the target mRNA. dsRNAs and siRNAs in particular can be used to silence gene expression in mammalian cells (e.g., human cells). siRNAs also include short hairpin RNAs (shRNAs) with 29-base-pair stems and 2-nucleotide 3′ overhangs. See, e.g., Clemens et al. (2000) Proc. Natl. Acad. Sci. USA 97:6499-6503; Billy et al. (2001) Proc. Natl. Sci. USA 98:14428-14433; Elbashir et al. (2001) Nature, 411:494-8; Yang et al. (2002) Proc. Natl. Acad. Sci. USA 99:9942-9947; Siolas et al. (2005), Nat. Biotechnol. 23(2):227-31; 20040086884; U.S. 20030166282; 20030143204; 20040038278; and 20030224432.

### Modifications of Nucleic Acid Fusion Inhibitor Molecules

[1182] A nucleic acid fusion inhibitor can be modified to enhance or obtain beneficial characteristics. For example, a nucleic acid fusion inhibitor can be modified at the base moiety, sugar moiety or phosphate backbone to improve, e.g., the stability, hybridization, or solubility of the molecule. For non-limiting examples of synthetic oligonucleotides with modifications see Toulmé (2001) Nature Biotech. 19:17 and Faria et al. (2001) Nature Biotech. 19:40-44. Such phosphoramidite oligonucleotides can be effective antisense agents.

[1183] A nucleic acid fusion inhibitor molecule can be modified to include one or more bridged nucleic acids (BNAs). A bridged nucleic acid is a nucleotide bearing a conformationally restricted sugar moiety. Oligonucleotides containing BNAs show high binding affinity with RNA complementary strands, and are more tolerant to endonucleolytic and exonucleolytic degradation (Roongjang, S. et al., (2007) Nucleic Acids Symp Ser (Oxf) 51:113-114). Exemplary BNAs include, but are not limited to 2′4′-BNA (also known as LNA (see below); 3′-amino2′,4′-BNA, 3′,4′-BNA; BNA^{COC}; BNA^{NC}, and BNA^{(ME)}. The structure of the BNA will influence the binding affinity of the nucleic acid molecule with complementary single stranded DNA and double stranded DNA, as well as its enzymatic stability against nuclease degradation. The synthesis and purification of BNA molecules can be performed using standard protocols, (e.g., see Imanishi T, et al., (2002) Chem. Commun. 16: 1653-1659).

[1184] In some embodiments, the nucleic acid can be modified to generate peptide nucleic acids (see Hyrup B. et al. (1996) Bioorganic & Medicinal Chemistry 4: 5-23). As used herein, the terms “peptide nucleic acid” or “PNA” refers to a nucleic acid mimic, e.g., a DNA or RNA mimic, in which the deoxyribose or ribose phosphate backbone is replaced by a pseudopeptide backbone and only the four natural nucleobases are retained. The neutral backbone of a PNA can allow for specific hybridization to DNA and RNA under conditions of low ionic strength. PNAs of nucleic acid fusion inhibitor molecules can be used in therapeutic and diagnostic applications. For example, PNAs can be used as antisense, antigene, siRNA, or RNAi agents for sequence-specific modulation of gene expression by, for example, inducing transcription or translation arrest or inhibiting replication. PNAs of nucleic acid fusion inhibitor molecules can also be used in the analysis of single base pair mutations in a gene, (e.g., by PNA-directed PCR clamping); as ‘artificial restriction enzymes’ when used in combination with other enzymes, (e.g., SI nucleases (Hyrup B. et al. (1996) supra)); or as probes or primers for DNA sequencing or hybridization (Hyrup B. et al. (1996) supra; Perry-O'Keefe supra).

[1185] The synthesis of PNA oligomers can be performed using standard solid phase peptide synthesis protocols as described in Hyrup B. et al. (1996) supra and Perry-O'Keefe et al. Proc. Natl. Acad. Sci. 93: 14670-675. Representative U.S. patents that teach the preparation of PNA compounds include, but are not limited to, U.S. Pat. Nos. 5,539,082; 5,714,331; and 5,719,262, the entire contents of each of which are hereby incorporated herein by reference. Additional PNA compounds suitable for use in RNA molecules are described in, for example, in Nielsen et al., Science, 1991, 254, 1497-1500.

[1186] The nucleic acid fusion inhibitor molecules can also be modified to include one or more locked nucleic acids (LNA). A locked nucleic acid is a nucleotide having a modified sugar moiety in which the sugar moiety comprises an extra bridge connecting the 2′ and 4′ carbons. This structure effectively “locks” the ribose in the 3′-endo structural conformation. LNA containing nucleic acid molecules possess high affinity to complementary DNA and RNA and improved mismatch discrimination relative to unmodified nucleic acid molecules (Jepson. J., et al., (2004) Oligonucleotides 14:130-146). The addition of locked nucleic acids to siRNAs has been shown to increase siRNA stability in serum, and to reduce off-target effects (Elmen, J. et al., (2005) Nucleic Acids Research 33(1):439-447; Mook. O R. et al., (2007) Mol Canc Ther 6(3):833-843; Grunweller, A. et al., (2003) Nucleic Acids Research 31(12):3185-3193). Representative U.S. Patents that teach the preparation of locked nucleic acid nucleotides include, but are not limited to, the following: U.S. Pat. Nos. 6,268,490; 6,670,461; 6,794,499; 6,998,484; 7,053,207; 7,084,125; and 7,399,845, the entire contents of each of which are hereby incorporated herein by reference.

[1187] A nucleic acid fusion inhibitor molecule can also include nucleobase (often referred to in the art simply as “base”) modifications or substitutions. As used herein, “unmodified” or “natural” nucleobases include the purine bases adenine (A) and guanine (G), and the pyrimidine bases thymine (T), cytosine (C) and uracil (U). Modified nucleobases include other synthetic and natural nucleobases such as 5-methylcytosine (5-me-C), 5-hydroxymethyl cytosine, xanthine, hypoxanthine, 2-aminoadenine, 6-methyl and other alkyl derivatives of adenine and guanine, 2-propyl and other alkyl derivatives of adenine and guanine, 2-thiouracil, 2-thiothymine and 2-thiocytosine, 5-halouracil and cytosine, 5-propynyl uracil and cytosine, 6-azo uracil, cytosine and thymine, 5-uracil (pseudouracil), 4-thiouracil, 8-halo, 8-amino, 8-thiol, 8-thioalkyl, 8-hydroxyl anal other 8-substituted adenines and guanines, 5-halo, particularly 5-bromo, 5-trifluoromethyl and other 5-substituted uracils and cytosines, 7-methylguanine and 7-methyladenine, 8-azaguanine and 8-azaadenine, 7-deazaguanine and 7-daazaadenine and 3-deazaguanine and 3-deazaadenine. Further nucleobases include those disclosed in U.S. Pat. No. 3,687,808, those disclosed in Modified Nucleosides in Biochemistry, Biotechnology and Medicine, Herdewijn, P. ed. Wiley-VCH, 2008; those disclosed in The Concise Encyclopedia Of Polymer Science And Engineering, pages 858-859, Kroschwitz, J. L, ed. John Wiley & Sons, 1990, these disclosed by Englisch et al., Angewandte Chemie, International Edition, 1991, 30, 613, and those disclosed by Sanghvi, Y S., Chapter 15, dsRNA Research and Applications, pages 289-302, Crooke, S. T, and Lebleu. B., Ed., CRC Press, 1993. Certain of these nucleobases are particularly useful for increasing the binding affinity of the oligomeric compounds featured in the invention. These include 5-substituted pyrimidines, 6-azapyrimidines and N-2, N-6 and 0-6 substituted purines, including 2-aminopropyladenine, 5-propynyluracil and 5-propynylcytosine, 5-methylcytosine substitutions have been shown to increase nucleic acid duplex stability by 0.6-1.2° C. (Sanghvi, Y. S., Crooke, S. T, and Lebleu, B., Eds., dsRNA Research and Applications, CRC Press, Boca Raton, 1993, pp. 276-278) and are exemplary base substitutions, even more particularly when combined with 2′-O-methoxyethyl sugar modifications.

[1188] Representative U.S. patents that teach the preparation of certain of the above noted modified nucleobases as well as other modified nucleobases include, but are not limited to, the above noted U.S. Pat. Nos. 3,687,808, 4,845,205; 5,130,30; 5,134,066; 5,175,273; 5,367,066; 5,432,272; 5,457,187; 5,459,255; 5,484,908; 5,502,177; 5,525,711; 5,552,540; 5,587,469; 5,594,121, 5,596,091; 5,614,617; 5,681.941; 5,750,692; 6,015,886; 6,147,200; 6,166,197; 6,222,025; 6,235,887; 6,380,368; 6,528,640; 6,639,062; 6,617,438; 7,045,610; 7,427,672; and 7,495,088, the entire contents of each of which are hereby incorporated herein by reference.

[1189] Potentially stabilizing modifications to the ends of nucleic acid fusion inhibitor molecules can include N-(acetylaminocaproyl)-4-hydroxyprolinol (Hyp-C6-NHAc), N-(caproyl-4-hydroxyprolinol (Hyp-C6), N-(acetyl-4-hydroxyprolinol (Hyp-NHAc), thymidine-2′-0-deoxythymidine (ether), N-(aminocaproyl)-4-hydroxyprolinol (Hyp-C6-amino), 2-docosanoyl-uridine-3″-phosphate, inverted base dT(idT) and others. Disclosure of this modification can be found in PCT Publication No. WO 2011/005861.

[1190] In other embodiments, the nucleic acid fusion inhibitor molecule may include other appended groups such as peptides (e.g., for targeting host cell receptors in vivo), or agents facilitating transport across the cell membrane (see, e.g., Letsinger et al. (1989) Proc. Natl. Acad. Sci. USA 86:6553-6556; Lemaitre et al. (1987) Proc. Natl. Acad. Sci. USA 84:648-652; WO88/09810) or the blood-brain barrier (see, e.g., WO 89/10134). In addition, oligonucleotides can be modified with hybridization-triggered cleavage agents (see, e.g., Krol et al. (1988) Bio-Techniques 6:958-976) or intercalating agents (See, e.g., Zon (1988) Pharm. Res. 5:539-549). To this end, the oligonucleotide may be conjugated to another molecule, (e.g., a peptide, hybridization triggered cross-linking agent, transport agent, or hybridization-triggered cleavage agent).

[1191] In some embodiment, modifications to the fusion nucleic acid molecules can include, for example, end modifications, e.g., 5′-end modifications (phosphorylation, conjugation, inverted linkages) or 3′-end modifications (conjugation, DNA nucleotides, inverted linkages, etc.); base modifications, e.g., replacement with stabilizing bases, destabilizing bases, or bases that base pair with an expanded repertoire of partners, removal of bases (abasic nucleotides), or conjugated bases; sugar modifications (e.g., at the 2′-position or 4′-position) or replacement of the sugar; and/or backbone modifications, including modification or replacement of the phosphodiester linkages. Specific examples include, but are not limited to fusion nucleic acid molecules containing modified backbones or no natural internucleoside linkages, fusion nucleic acid molecules having modified backbones include, among others, those that do not have a phosphorus atom in the backbone.

[1192] Modified nucleic acid backbones include, for example, phosphorothioates, chiral phosphorothioates, phosphorodithioates, phosphotriesters, aminoalkylphosphotriesters, methyl and other alkyl phosphonates including 3′-alkylene phosphonates and chiral phosphonates, phosphinates, phosphoramidates including 3′-amino phosphoramidate and aminoalkylphosphoramidates, thionophosphoramidates, thionoalkylphosphonates, thionoalkylphosphotriesters, and boranophosphates having normal 3′-5′ linkages, 2′-5′-linked analogs of these, and those having inverted polarity wherein the adjacent pairs of nucleoside units are linked 3′-5′ to 5′-3′ or 2′-5′ to 5′-2′.

[1193] Various salts, mixed salts and free acid forms are also included.

[1194] Representative U.S. patents that teach the preparation of the above phosphorus-containing linkages include, but are not limited to, U.S. Pat. Nos. 3,687,808; 4,469,863; 4,476,301; 5,023,243; 5,177,195; 5,188,897; 5,264,423; 5,276,019; 5,278,302; 5,286,717; 5,321,131; 5,399,676; 5,405,939; 5,453,496; 5,455,233; 5,466,677; 5,476,925; 5,519,126; 5,536,821; 5,541,316; 5,550,111; 5,563,253; 5,571,799; 5,587,361; 5,625,050; 6,028,188; 6,124,445; 6,160,109; 6,169,170; 6,172,209; 6,239,265; 6,277,603; 6,326,199; 6,346,614; 6,444,423; 6,531,590; 6,534,639; 6,608,035; 6,683,167; 6,858,715; 6,867,294; 6,878,805; 7,015,315; 7,041,816; 7,273,933; 7,321,029; and US Pat RE39464, the entire contents of each of which are hereby incorporated herein by reference.

[1195] Modified nucleic acid backbones that do not include a phosphorus atom therein have backbones that are formed by short chain alkyl or cycloalkyl internucleoside linkages, mixed heteroatoms and alkyl or cycloalkyl internucleoside linkages, or one or more short chain heteroatomic or heterocyclic internucleoside linkages. These include those having morpholino linkages (formed in part from the sugar portion of a nucleoside); siloxane backbones; sulfide, sulfoxide and sulfone backbones; formacetyl and thioformacetyl backbones; methylene formacetyl and thioformacetyl backbones; alkene containing backbones; sulfamate backbones; methyleneimino and methylenehydrazino backbones; sulfonate and sulfonamide backbones; amide backbones; and others having mixed N, O, S and CH₂ component parts.

[1196] Representative U.S. patents that teach the preparation of the above oligonucleosides include, but are not limited to, U.S. Pat. Nos. 5,034,506; 5,166,315; 5,185,444; 5,214,134; 5,216,141; 5,235,033; 5,64,562; 5,264,564; 5,405,938; 5,434,257; 5,466,677; 5,470,967; 5,489,677; 5,541,307; 5,561,225; 5,596,086; 5,602,240; 5,608,046; 5,610,289; 5,618,704; 5,623,070; 5,663,312; 5,633,360; 5,677,437; and, 5,677,439, the entire contents of each of which are hereby incorporated herein by reference.

[1197] Some embodiments include nucleic acid fusion inhibitor molecules with phosphorothioate backbones and oligonucleosides with heteroatom backbones, and in particular —CH₂—NH—CH₂—, —CH₂—N(CH₃)—O—CH₂—[known as a methylene (methylimino) or MMI backbone], —CH₂—O—N(CH₃)—CH₂—, —CH₂—N(CH₃)—N(CH₃)—CH₂— and —N(CH₃)—CH₂—CH₂—[wherein the native phosphodiester backbone is represented as —O—P—O—CH₂—] of the above-referenced U.S. Pat. No. 5,489,677, and the amide backbones of the above-referenced U.S. Pat. No. 5,602,240.

[1198] Modified nucleic acid fusion inhibitor molecules can also contain one or more substituted sugar moieties. The nucleic acid, e.g., RNA, molecules can include one of the following at the 2′-position: OIH; F; O-, S-, or N-alkyl; O-, S-, or N-alkenyl; O-, S- or N-alkynyl; or O-alkyl-O-alkyl, wherein the alkyl, alkenyl and alkynyl can be substituted or unsubstituted C₁ to C₁₀ alkyl or C₂ to C₁₀ alkenyl and alkynyl. Exemplary suitable modifications include O[(CH₂)ₙO]ₘCH₃, O(CH₂)ₙOCH₃, O(CH₂)ₙNH₂, O(CH₂)ₙCH₃, O(CH₂)ₙONH₂, and O(CH₂)ₙON[(CH₂)ₙCH₃)]₂, where n and m are from 1 to about 10. In other embodiments, dsRNAs include one of the following at the 2′ position: C₁ to C₁₀ lower alkyl, substituted lower alkyl, alkaryl, aralkyl, O-alkaryl or O-aralkyl, SH, SCH₃, OCN, Cl, Br, CN, CF₃, OCF₃, SOCH₃, SO₂CH₃, ONO₂, NO₂, N₃, NH₂, heterocycloalkyl, heterocycloalkaryl, aminoalkylamino, polyalkylamino, substituted silyl, an RNA cleaving group, a reporter group, an intercalator, a group for improving the pharmacokinetic properties of an RNA molecule, or a group for improving the pharmacodynamic properties of an RNA molecule, and other substituents having similar properties. In some embodiments, the modification includes a 2′-methoxyethoxy (2′-O—CH₂CH₂OCH₃, also known as 2′-O-(2-methoxyethyl) or 2′-MOE) (Martin et al., Helv. Chim. Acta, 1995, 78:486-504) i.e., an alkoxy-alkoxy group. Another exemplary modification is 2′-dimethylaminooxyethoxy, i.e., a O(CH₂)₂ON(CH₃)₂ group, also known as 2′-DMAOE, as described in examples herein below, and 2′-dimethylaminoethoxyethoxy (also known in the art as 2′-O-dimethylaminoethoxyethyl or 2′-DMAEOE), i.e., 2′-O—CH₂—O—CH—N(CH₂)₂.

[1199] Other modifications can include 2′-methoxy (2′-OCH₃), 2′-aminopropoxy (2′-OCH₂Cl₂CH₂NH₂) and 2′-fluoro (2′-F). Similar modifications can also be made at other positions on the RNA of an RNA molecule, particularly the 3′ position of the sugar on the 3′ terminal nucleotide or in 2′-5′ linked dsRNAs and the 5′ position of 5′ terminal nucleotide. RNA molecules can also have sugar mimetics such as cyclobutyl moieties in place of the pentofuranosyl sugar. Representative U.S. patents that teach the preparation of such modified sugar structures include, but are not limited to, U.S. Pat. Nos. 4,981,957; 5,118,800; 5,319,080; 5,359,044; 5,393,878; 5,446,137; 5,466,786; 5,514,785; 5,519,134; 5,567,811; 5,576,427; 5,591,722; 5,597,909; 5,610,300; 5,627,053; 5,639,873; 5,646,265; 5,658,873; 5,670,633; and 5,700,920, certain of which are commonly owned with the instant application. The entire contents of each of the foregoing are hereby incorporated herein by reference. Evaluation of Subjects

[1200] Subjects, e.g., patients, can be evaluated for the presence of a fusion molecule described herein. A patient can be evaluated, for example, by determining the genomic sequence of the patient, e.g., by an NGS method. Alternatively, or in addition, evaluation of a patient can include directly assaying for the presence of a fusion described herein, in the patient, such as by an assay to detect a fusion nucleic acid (e.g., DNA or RNA), such as by, Southern blot, Northern blot, or RT-PCR, e.g., qRT-PCR. Alternatively, or in addition, a patient can be evaluated for the presence of a protein fusion, such as by immunohistochemistry, Western blot, immunoprecipitation, or immunomagnetic bead assay.

[1201] Evaluation of a patient can also include a cytogenetic assay, such as by fluorescence in situ hybridization (FISH), to identify the chromosomal rearrangement resulting in the fusion. For example, to perform FISH, at least a first probe tagged with a first detectable label can be designed to target CEP89, such as in one or more exons of CEP89 and at least a second probe tagged with a second detectable label can be designed to target BRAF, such as in one or more exons of BRAF (e.g., the exons containing the part of the protein that includes the tyrosine kinase domain). The at least one first probe and the at least one second probe will be closer together in patients who carry the CEP89-BRAF fusion than in patients who do not carry the CEP89-BRAF fusion. These methods can be utilized in a similar manner for any fusion described herein.

[1202] Additional methods for fusion detection are provided below.

[1203] In one aspect, the results of a clinical trial, e.g., a successful or unsuccessful clinical trial, can be repurposed to identify agents that target a fusion described herein. By one exemplary method, a candidate agent used in a clinical trial can be reevaluated to determine if the agent in the trial targets a fusion, or is effective to treat a tumor containing a particular fusion. For example, subjects who participated in a clinical trial for an agent, such as a kinase inhibitor, can be identified. Patients who experienced an improvement in symptoms, e.g., cancer (e.g., lung cancer) symptoms, such as decreased tumor size, or decreased rate of tumor growth, can be evaluated for the presence of a fusion described herein. Patients who did not experience an improvement in cancer symptoms can also be evaluated for the presence of a fusion described herein. Where patients carrying a fusion described herein are found to have been more likely to respond to the test agent than patients who did not carry such a fusion, then the agent is determined to be an appropriate treatment option for a patient carrying the fusion.

[1204] “Reevaluation” of patients can include, for example, determining the genomic sequence of the patients, or a subset of the clinical trial patients, e.g., by an NGS method. Alternatively, or in addition, reevaluation of the patients can include directly assaying for the presence of a fusion described herein, in the patient, such as by an assay to detect a fusion nucleic acid (e.g., RNA), such as by RT-PCR, e.g., qRT-PCR. Alternatively, or in addition, a patient can be evaluated for the presence of a protein fusion, such as by immunohistochemistry, Western blot, immunoprecipitation, or immunomagnetic bead assay.

[1205] Clinical trials suitable for repurposing as described above include trials that tested tyrosine kinase inhibitors, and multikinase inhibitors.

### Methods for Detection of Fusion Nucleic Acids and Polypeptides

[1206] Methods for evaluating a fusion gene, mutations and/or gene products are known to those of skill in the art. In one embodiment, the fusion is detected in a nucleic acid molecule by a method chosen from one or more of: nucleic acid hybridization assay, amplification-based assays (e.g., polymerase chain reaction (PCR)), PCR-RFLP assay, real-time PCR, sequencing, screening analysis (including metaphase cytogenetic analysis by standard karyotype methods, FISH (e.g., break away FISH), spectral karyotyping or MFISH, comparative genomic hybridization), in situ hybridization, SSP, HPLC or mass-spectrometric genotyping.

[1207] Additional exemplary methods include, traditional “direct probe” methods such as Southern blots or in situ hybridization (e.g., fluorescence in situ hybridization (FISH) and FISH plus SKY), and “comparative probe” methods such as comparative genomic hybridization (CGH), e.g., cDNA-based or oligonucleotide-based CGH, can be used. The methods can be used in a wide variety of formats including, but not limited to, substrate (e.g., membrane or glass) bound methods or array-based approaches.

[1208] In certain embodiments, the evaluation methods include the probes/primers described herein. In one embodiment, probes/primers can be designed to detect a fusion molecule described herein or a reciprocal thereof. Probes/primers are suitable, e.g., for FISH or PCR amplification. For PCR, e.g., to amply a region including a fusion junction described herein, forward primers can be designed to hybridize to a gene sequence from nucleotides corresponding to one of the genes of a fusion described herein, and reverse primers can be designed to hybridize to a sequence from nucleotides corresponding to the second gene involved in the fusion.

[1209] For example, probes/primers can be designed to detect a CEP89-BRAF fusion or a reciprocal thereof. The BRAF probes/primers can hybridize to the nucleotides encoding one or more exons of the FGFR3 protein. The CEP89 probes/primers can hybridize to the nucleotides encoding one or more exons of the CEP89 protein). These probes/primers are suitable, e.g., for FISH or PCR amplification.

[1210] The probes/primers described above use CEP89-BRAF as an example, and such methods can be readily applied to any of the fusions described herein by one of skill in the art.

[1211] In one embodiment, FISH analysis is used to identify the chromosomal rearrangement resulting in the fusions as described above. For example, to perform FISH, at least a first probe tagged with a first detectable label can be designed to target a first gene of a fusion described herein, such as in one or more exons of the gene and at least a second probe tagged with a second detectable label can be designed to target a second gene of the fusion, such as in one or more exons of genes (e.g., the exons containing the part of the protein that includes the tyrosine kinase domain). The at least one first probe and the at least one second probe will be closer together in a subject who carries the fusion compared to a subject who does not carry the fusion.

[1212] In one approach, a variation of a FISH assay, e.g., “break-away FISH”, is used to evaluate a patient. By this method, at least one probe targeting the fusion junction and at least one probe targeting an individual gene of the fusion, e.g., at one or more exons and or introns of the gene, are utilized. In normal cells, both probes will be observed (or a secondary color will be observed due to the close proximity of the two genes of the gene fusion), and only the single gene probe will be observed when the translocation occurs. Other variations of the FISH method known in the art are suitable for evaluating a patient.

[1213] For example, by this method, at least one probe targeting the BRAF intron 8/CEP89 intron 16 junction and at least one probe targeting CEP89 (or BRAF), e.g., at one or more exons and or introns of CEP89 or BRAF, are utilized. In normal cells, both probes will be observed (or a secondary color will be observed due to the close proximity of the CEP89 and BRAF genes), and only the CEP89 probe will be observed when the translocation occurs. Other variations of the FISH method known in the art are suitable for evaluating a patient.

[1214] The FISH methods described herein above use CEP89-BRAF as an example, and such methods can be readily applied to any of the fusions described herein by one of skill in the art.

[1215] Probes are used that contain DNA segments that are essentially complementary to DNA base sequences existing in different portions of chromosomes. Examples of probes useful according to the invention, and labeling and hybridization of probes to samples are described in two U.S. patents to Vysis, Inc. U.S. Pat. Nos. 5,491,224 and 6,277,569 to Bittner, et al.

[1216] Additional protocols for FISH detection are described below.

[1217] Chromosomal probes are typically about 50 to about 10³ nucleotides in length. Longer probes typically comprise smaller fragments of about 100 to about 500 nucleotides in length. Probes that hybridize with centromeric DNA and locus-specific DNA are available commercially, for example, from Vysis, Inc. (Downers Grove, Ill.), Molecular Probes, Inc. (Eugene, Oreg.) or from Cytocell (Oxfordshire, UK). Alternatively, probes can be made non-commercially from chromosomal or genomic DNA through standard techniques. For example, sources of DNA that can be used include genomic DNA, cloned DNA sequences, somatic cell hybrids that contain one, or a part of one, chromosome (e.g., human chromosome) along with the normal chromosome complement of the host, and chromosomes purified by flow cytometry or microdissection. The region of interest can be isolated through cloning, or by site-specific amplification via the polymerase chain reaction (PCR). See, for example, Nath and Johnson, Biotechnic Histochem., 1998, 73 (1):6-22, Wheeless et al., Cytometry 1994, 17:319-326, and U.S. Pat. No. 5,491,224.

[1218] The probes to be used hybridize to a specific region of a chromosome to determine whether a cytogenetic abnormality is present in this region. One type of cytogenetic abnormality is a deletion. Although deletions can be of one or more entire chromosomes, deletions normally involve loss of part of one or more chromosomes. If the entire region of a chromosome that is contained in a probe is deleted from a cell, hybridization of that probe to the DNA from the cell will normally not occur and no signal will be present on that chromosome. If the region of a chromosome that is partially contained within a probe is deleted from a cell, hybridization of that probe to the DNA from the cell can still occur, but less of a signal can be present. For example, the loss of a signal is compared to probe hybridization to DNA from control cells that do not contain the genetic abnormalities which the probes are intended to detect. In some embodiments, at least 1, 5, 10, 20, 30, 40, 50, 60, 70, 80, 90, 100, 110, 120, 130, 140, 150, 160, 170, 180, 190, 200, or more cells are enumerated for presence of the cytogenetic abnormality.

[1219] Cytogenetic abnormalities to be detected can include, but are not limited to, non-reciprocal translocations, balanced translocations, intra-chromosomal inversions, point mutations, deletions, gene copy number changes, gene expression level changes, and germ line mutations. In particular, one type of cytogenetic abnormality is a duplication. Duplications can be of entire chromosomes, or of regions smaller than an entire chromosome. If the region of a chromosome that is contained in a probe is duplicated in a cell, hybridization of that probe to the DNA from the cell will normally produce at least one additional signal as compared to the number of signals present in control cells with no abnormality of the chromosomal region contained in the probe.

[1220] Chromosomal probes are labeled so that the chromosomal region to which they hybridize can be detected. Probes typically are directly labeled with a fluorophore, an organic molecule that fluoresces after absorbing light of lower wavelength/higher energy. The fluorophore allows the probe to be visualized without a secondary detection molecule. After covalently attaching a fluorophore to a nucleotide, the nucleotide can be directly incorporated into the probe with standard techniques such as nick translation, random priming, and PCR labeling. Alternatively, deoxycytidine nucleotides within the probe can be transaminated with a linker. The fluorophore then is covalently attached to the transaminated deoxycytidine nucleotides. See, U.S. Pat. No. 5,491,224.

[1221] U.S. Pat. No. 5,491,224 describes probe labeling as a number of the cytosine residues having a fluorescent label covalently bonded thereto. The number of fluorescently labeled cytosine bases is sufficient to generate a detectable fluorescent signal while the individual so labeled DNA segments essentially retain their specific complementary binding (hybridizing) properties with respect to the chromosome or chromosome region to be detected. Such probes are made by taking the unlabeled DNA probe segment, transaminating with a linking group a number of deoxycytidine nucleotides in the segment, covalently bonding a fluorescent label to at least a portion of the transaminated deoxycytidine bases.

[1222] Probes can also be labeled by nick translation, random primer labeling or PCR labeling. Labeling is done using either fluorescent (direct)- or haptene (indirect)-labeled nucleotides. Representative, non-limiting examples of labels include: AMCA-6-dUTP, CascadeBlue-4-dUTP, Fluorescein-12-dUTP, Rhodamine-6-dUTP, TexasRed-6-dUTP, Cy3-6-dUTP, Cy5-dUTP, Biotin(BIO)-11-dUTP, Digoxygenin(DIG)-11-dUTP or Dinitrophenyl (DNP)-11-dUTP.

[1223] Probes also can be indirectly labeled with biotin or digoxygenin, or labeled with radioactive isotopes such as ³²p and ³H, although secondary detection molecules or further processing then is required to visualize the probes. For example, a probe labeled with biotin can be detected by avidin conjugated to a detectable marker. For example, avidin can be conjugated to an enzymatic marker such as alkaline phosphatase or horseradish peroxidase. Enzymatic markers can be detected in standard colorimetric reactions using a substrate and/or a catalyst for the enzyme. Catalysts for alkaline phosphatase include 5-bromo-4-chloro-3-indolylphosphate and nitro blue tetrazolium. Diaminobenzoate can be used as a catalyst for horseradish peroxidase.

[1224] Probes can also be prepared such that a fluorescent or other label is not part of the DNA before or during the hybridization, and is added after hybridization to detect the probe hybridized to a chromosome. For example, probes can be used that have antigenic molecules incorporated into the DNA. After hybridization, these antigenic molecules are detected using specific antibodies reactive with the antigenic molecules. Such antibodies can themselves incorporate a fluorochrome, or can be detected using a second antibody with a bound fluorochrome.

[1225] However treated or modified, the probe DNA is commonly purified in order to remove unreacted, residual products (e.g., fluorochrome molecules not incorporated into the DNA) before use in hybridization.

[1226] Prior to hybridization, chromosomal probes are denatured according to methods well known in the art. Probes can be hybridized or annealed to the chromosomal DNA under hybridizing conditions. “Hybridizing conditions” are conditions that facilitate annealing between a probe and target chromosomal DNA. Since annealing of different probes will vary depending on probe length, base concentration and the like, annealing is facilitated by varying probe concentration, hybridization temperature, salt concentration and other factors well known in the art.

[1227] Hybridization conditions are facilitated by varying the concentrations, base compositions, complexities, and lengths of the probes, as well as salt concentrations, temperatures, and length of incubation. For example, in situ hybridizations are typically performed in hybridization buffer containing 1-2×SSC, 50-65% formamide and blocking DNA to suppress non-specific hybridization. In general, hybridization conditions, as described above, include temperatures of about 25° C. to about 55° C., and incubation lengths of about 0.5 hours to about 96 hours.

[1228] Non-specific binding of chromosomal probes to DNA outside of the target region can be removed by a series of washes. Temperature and concentration of salt in each wash are varied to control stringency of the washes. For example, for high stringency conditions, washes can be carried out at about 65° C. to about 80° C., using 0.2× to about 2×SSC, and about 0.1% to about 1% of a non-ionic detergent such as Nonidet P-40 (NP40). Stringency can be lowered by decreasing the temperature of the washes or by increasing the concentration of salt in the washes. In some applications it is necessary to block the hybridization capacity of repetitive sequences. Thus, in some embodiments, tRNA, human genomic DNA, or Cot-I DNA is used to block non-specific hybridization. After washing, the slide is allowed to drain and air dry, then mounting medium, a counterstain such as DAPI, and a coverslip are applied to the slide. Slides can be viewed immediately or stored at −20° C., before examination.

[1229] For fluorescent probes used in fluorescence in situ hybridization (FISH) techniques, fluorescence can be viewed with a fluorescence microscope equipped with an appropriate filter for each fluorophore, or by using dual or triple band-pass filter sets to observe multiple fluorophores. See, for example, U.S. Pat. No. 5,776,688. Alternatively, techniques such as flow cytometry can be used to examine the hybridization pattern of the chromosomal probes.

[1230] In CGH methods, a first collection of nucleic acids (e.g., from a sample, e.g., a possible tumor) is labeled with a first label, while a second collection of nucleic acids (e.g., a control, e.g., from a healthy cell/tissue) is labeled with a second label. The ratio of hybridization of the nucleic acids is determined by the ratio of the two (first and second) labels binding to each fiber in the array. Where there are chromosomal deletions or multiplications, differences in the ratio of the signals from the two labels will be detected and the ratio will provide a measure of the copy number. Array-based CGH can also be performed with single-color labeling (as opposed to labeling the control and the possible tumor sample with two different dyes and mixing them prior to hybridization, which will yield a ratio due to competitive hybridization of probes on the arrays). In single color CGH, the control is labeled and hybridized to one array and absolute signals are read, and the possible tumor sample is labeled and hybridized to a second array (with identical content) and absolute signals are read. Copy number difference is calculated based on absolute signals from the two arrays.

[1231] Hybridization protocols suitable for use with the methods featured in the invention are described, e.g., in Albertson (1984) EMBO J. 3: 1227-1234; Pinkel (1988) Proc. Natl. Acad. Sci. USA 85: 9138-9142; EPO Pub. No. 430,402; Methods in Molecular Biology, Vol. 33: In situ Hybridization Protocols, Choo, ed., Humana Press, Totowa, N.J. (1994), etc. In one embodiment, the hybridization protocol of Pinkel, et al. (1998) Nature Genetics 20: 207-211, or of Kallioniemi (1992) Proc. Natl Acad. Sci USA 89:5321-5325 (1992) is used. Array-based CGH is described in U.S. Pat. No. 6,455,258, the contents of each of which are incorporated herein by reference.

[1232] In still another embodiment, amplification-based assays can be used to measure presence/absence and copy number. In such amplification-based assays, the nucleic acid sequences act as a template in an amplification reaction (e.g., Polymerase Chain Reaction (PCR). In a quantitative amplification, the amount of amplification product will be proportional to the amount of template in the original sample. Comparison to appropriate controls, e.g., healthy tissue, provides a measure of the copy number.

[1233] Methods of “quantitative” amplification are well known to those of skill in the art. For example, quantitative PCR involves simultaneously co-amplifying a known quantity of a control sequence using the same primers. This provides an internal standard that can be used to calibrate the PCR reaction. Detailed protocols for quantitative PCR are provided in Innis, et al. (1990) PCR Protocols, A Guide to Methods and Applications, Academic Press, Inc. N.Y.). Measurement of DNA copy number at microsatellite loci using quantitative PCR analysis is described in Ginzonger, et al. (2000) Cancer Research 60:5405-5409. The known nucleic acid sequence for the genes is sufficient to enable one of skill in the art to routinely select primers to amplify any portion of the gene. Fluorogenic quantitative PCR can also be used. In fluorogenic quantitative PCR, quantitation is based on amount of fluorescence signals. e.g., TaqMan and sybr green.

[1234] Other suitable amplification methods include, but are not limited to, ligase chain reaction (LCR) (see Wu and Wallace (1989) Genomics 4: 560, Landegren, et al. (1988) Science 241:1077, and Barringer et al. (1990) Gene 89: 117), transcription amplification (Kwoh, et al. (1989) Proc. Natl. Acad. Sci. USA 86: 1173), self-sustained sequence replication (Guatelli, et al. (1990) Proc. Nat. Acad. Sci. USA 87: 1874), dot PCR, and linker adapter PCR, etc.

### Nucleic Acid Samples

[1235] A variety of tissue samples can be the source of the nucleic acid samples used in the present methods. Genomic or subgenomic DNA fragments can be isolated from a subject's sample (e.g., a tumor sample, a normal adjacent tissue (NAT), a blood sample or any normal control)). In certain embodiments, the tissue sample is preserved as a frozen sample or as formaldehyde- or paraformaldehyde-fixed paraffin-embedded (FFPE) tissue preparation. For example, the sample can be embedded in a matrix, e.g., an FFPE block or a frozen sample. The isolating step can include flow-sorting of individual chromosomes; and/or micro-dissecting a subject's sample (e.g., a tumor sample, a NAT, a blood sample).

[1236] Protocols for DNA isolation from a tissue sample are known in the art. Additional methods to isolate nucleic acids (e.g., DNA) from formaldehyde- or paraformaldehyde-fixed, paraffin-embedded (FFPE) tissues are disclosed, e.g., in Cronin M. et al., (2004) Am J Pathol. 164(1):35-42; Masuda N. et al., (1999) Nucleic Acids Res. 27(22):4436-4443; Specht K. et al., (2001) Am J Pathol. 158(2):419-429, Ambion RecoverAll™ Total Nucleic Acid Isolation Protocol (Ambion, Cat. No. AM1975, September 2008), and QIAamp® DNA FFPE Tissue Handbook (Qiagen, Cat. No. 37625, October 2007). RecoverAll™ Total Nucleic Acid Isolation Kit uses xylene at elevated temperatures to solubilize paraffin-embedded samples and a glass-fiber filter to capture nucleic acids. QIAamp® DNA FFPE Tissue Kit uses QIAamp® DNA Micro technology for purification of genomic and mitochondrial DNA.

[1237] The isolated nucleic acid samples (e.g., genomic DNA samples) can be fragmented or sheared by practicing routine techniques. For example, genomic DNA can be fragmented by physical shearing methods, enzymatic cleavage methods, chemical cleavage methods, and other methods well known to those skilled in the art. The nucleic acid library can contain all or substantially all of the complexity of the genome. The term “substantially all” in this context refers to the possibility that there can in practice be some unwanted loss of genome complexity during the initial steps of the procedure. The methods described herein also are useful in cases where the nucleic acid library is a portion of the genome, i.e., where the complexity of the genome is reduced by design. In some embodiments, any selected portion of the genome can be used with the methods described herein. In certain embodiments, the entire exome or a subset thereof is isolated.

[1238] Methods can further include isolating a nucleic acid sample to provide a library (e.g., a nucleic acid library). In certain embodiments, the nucleic acid sample includes whole genomic, subgenomic fragments, or both. The isolated nucleic acid samples can be used to prepare nucleic acid libraries. Thus, in one embodiment, the methods featured in the invention further include isolating a nucleic acid sample to provide a library (e.g., a nucleic acid library as described herein). Protocols for isolating and preparing libraries from whole genomic or subgenomic fragments are known in the art (e.g., Illumina's genomic DNA sample preparation kit). In certain embodiments, the genomic or subgenomic DNA fragment is isolated from a subject's sample (e.g., a tumor sample, a normal adjacent tissue (NAT), a blood sample or any normal control)). In one embodiment, the sample (e.g., the tumor or NAT sample) is a preserved. For example, the sample is embedded in a matrix, e.g., an FFPE block or a frozen sample. In certain embodiments, the isolating step includes flow-sorting of individual chromosomes; and/or microdissecting a subject's sample (e.g., a tumor sample, a NAT, a blood sample). In certain embodiments, the nucleic acid sample used to generate the nucleic acid library is less than 5, less than 1 microgram, less than 500 ng, less than 200 ng, less than 100 ng, less than 50 ng or less than 20 ng (e.g., 10 ng or less).

[1239] In still other embodiments, the nucleic acid sample used to generate the library includes RNA or cDNA derived from RNA. In some embodiments, the RNA includes total cellular RNA. In other embodiments, certain abundant RNA sequences (e.g., ribosomal RNAs) have been depleted. In some embodiments, the poly(A)-tailed mRNA fraction in the total RNA preparation has been enriched. In some embodiments, the cDNA is produced by random-primed cDNA synthesis methods. In other embodiments, the cDNA synthesis is initiated at the poly(A) tail of mature mRNAs by priming by oligo(dT)-containing oligonucleotides. Methods for depletion, poly(A) enrichment, and cDNA synthesis are well known to those skilled in the art.

[1240] The method can further include amplifying the nucleic acid sample (e.g., DNA or RNA sample) by specific or non-specific nucleic acid amplification methods that are well known to those skilled in the art. In some embodiments, certain embodiments, the nucleic acid sample is amplified, e.g., by whole-genome amplification methods such as random-primed strand-displacement amplification.

[1241] In other embodiments, the nucleic acid sample is fragmented or sheared by physical or enzymatic methods and ligated to synthetic adapters, size-selected (e.g., by preparative gel electrophoresis) and amplified (e.g., by PCR). In other embodiments, the fragmented and adapter-ligated group of nucleic acids is used without explicit size selection or amplification prior to hybrid selection.

[1242] In other embodiments, the isolated DNA (e.g., the genomic DNA) is fragmented or sheared. In some embodiments, the library includes less than 50% of genomic DNA, such as a subfraction of genomic DNA that is a reduced representation or a defined portion of a genome, e.g., that has been subfractionated by other means. In other embodiments, the library includes all or substantially all genomic DNA.

[1243] In some embodiments, the library includes less than 50% of genomic DNA, such as a subfraction of genomic DNA that is a reduced representation or a defined portion of a genome, e.g., that has been subfractionated by other means. In other embodiments, the library includes all or substantially all genomic DNA. Protocols for isolating and preparing libraries from whole genomic or subgenomic fragments are known in the art (e.g., Illumina's genomic DNA sample preparation kit). Alternative DNA shearing methods can be more automatable and/or more efficient (e.g., with degraded FFPE samples). Alternatives to DNA shearing methods can also be used to avoid a ligation step during library preparation.

[1244] The methods described herein can be performed using a small amount of nucleic acids, e.g., when the amount of source DNA is limiting (e.g., even after whole-genome amplification). In one embodiment, the nucleic acid comprises less than about 5 μg, 4 μg, 3 μg, 2 μg, 1 μg, 0.8 μg, 0.7 μg, 0.6 μg, 0.5 μg, or 400 ng, 300 ng, 200 ng, 100 ng, 50 ng, or 20 ng or less of nucleic acid sample. For example, to prepare 500 ng of hybridization-ready nucleic acids, one typically begins with 3 μg of genomic DNA. One can start with less, however, if one amplifies the genomic DNA (e.g., using PCR) before the step of solution hybridization. Thus it is possible, but not essential, to amplify the genomic DNA before solution hybridization.

[1245] In some embodiments, a library is generated using DNA (e.g., genomic DNA) from a sample tissue, and a corresponding library is generated with RNA (or cDNA) isolated from the same sample tissue.

### Design of Baits

[1246] A bait can be a nucleic acid molecule, e.g., a DNA or RNA molecule, which can hybridize to (e.g., be complementary to), and thereby allow capture of a target nucleic acid. In one embodiment, a bait is an RNA molecule. In other embodiments, a bait includes a binding entity, e.g., an affinity tag, that allows capture and separation, e.g., by binding to a binding entity, of a hybrid formed by a bait and a nucleic acid hybridized to the bait. In one embodiment, a bait is suitable for solution phase hybridization.

[1247] Baits can be produced and used by methods and hybridization conditions as described in US 2010/0029498 and Gnirke, A. et al. (2009) Nat Biotechnol. 27(2):182-189, and U.S. Ser. No. 61/428,568, filed Dec. 30, 2010, incorporated herein by reference. For example, biotinylated RNA baits can be produced by obtaining a pool of synthetic long oligonucleotides, originally synthesized on a microarray, and amplifying the oligonucleotides to produce the bait sequences. In some embodiments, the baits are produced by adding an RNA polymerase promoter sequence at one end of the bait sequences, and synthesizing RNA sequences using RNA polymerase. In one embodiment, libraries of synthetic oligodeoxynucleotides can be obtained from commercial suppliers, such as Agilent Technologies, Inc., and amplified using known nucleic acid amplification methods.

[1248] Each bait sequence can include a target-specific (e.g., a member-specific) bait sequence and universal tails on each end. As used herein, the term “bait sequence” can refer to the target-specific bait sequence or the entire oligonucleotide including the target-specific “bait sequence” and other nucleotides of the oligonucleotide. In one embodiment, a target-specific bait hybridizes to a nucleic acid sequence comprising a nucleic acid sequence in an intron of one gene of a fusion described herein, in an intron of the other gene of a fusion described herein, or a fusion junction joining the introns. In one embodiment, the bait is an oligonucleotide about 200 nucleotides in length, of which 170 nucleotides are target-specific “bait sequence”. The other 30 nucleotides (e.g., 15 nucleotides on each end) are universal arbitrary tails used for PCR amplification. The tails can be any sequence selected by the user.

[1249] The bait sequences described herein can be used for selection of exons and short target sequences. In one embodiment, the bait is between about 100 nucleotides and 300 nucleotides in length. In another embodiment, the bait is between about 130 nucleotides and 230 nucleotides in length. In yet another embodiment, the bait is between about 150 nucleotides and 200 nucleotides in length. The target-specific sequences in the baits, e.g., for selection of exons and short target sequences, are between about 40 nucleotides and 1000 nucleotides in length. In one embodiment, the target-specific sequence is between about 70 nucleotides and 300 nucleotides in length. In another embodiment, the target-specific sequence is between about 100 nucleotides and 200 nucleotides in length. In yet another embodiment, the target-specific sequence is between about 120 nucleotides and 170 nucleotides in length.

### Sequencing

[1250] The invention also includes methods of sequencing nucleic acids. In one embodiment, any of a variety of sequencing reactions known in the art can be used to directly sequence at least a portion of a fusion molecule described herein. In one embodiment, the fusion sequence is compared to a corresponding reference (control) sequence.

[1251] In one embodiment, the sequence of the fusion nucleic acid molecule is determined by a method that includes one or more of: hybridizing an oligonucleotide, e.g., an allele specific oligonucleotide for one alteration described herein to said nucleic acid, hybridizing a primer, or a primer set (e.g., a primer pair), that amplifies a region comprising the mutation or a fusion junction of the allele; amplifying, e.g., specifically amplifying, a region comprising the mutation or a fusion junction of the allele; attaching an adapter oligonucleotide to one end of a nucleic acid that comprises the mutation or a fusion junction of the allele; generating an optical, e.g., a colorimetric signal, specific to the presence of the one of the mutation or fusion junction; hybridizing a nucleic acid comprising the mutation or fusion junction to a second nucleic acid, e.g., a second nucleic acid attached to a substrate; generating a signal, e.g., an electrical or fluorescent signal, specific to the presence of the mutation or fusion junction; and incorporating a nucleotide into an oligonucleotide that is hybridized to a nucleic acid that contains the mutation or fusion junction.

[1252] In another embodiment, the sequence is determined by a method that comprises one or more of: determining the nucleotide sequence from an individual nucleic acid molecule, e.g., where a signal corresponding to the sequence is derived from a single molecule as opposed, e.g., from a sum of signals from a plurality of clonally expanded molecules; determining the nucleotide sequence of clonally expanded proxies for individual nucleic acid molecules; massively parallel short-read sequencing: template-based sequencing; pyrosequencing; real-time sequencing comprising imaging the continuous incorporation of dye-labeling nucleotides during DNA synthesis; nanopore sequencing; sequencing by hybridization; nano-transistor array based sequencing; polony sequencing; scanning tunneling microscopy (STM) based sequencing; or nanowire-molecule sensor based sequencing.

[1253] Any method of sequencing known in the art can be used. Exemplary sequencing reactions include those based on techniques developed by Maxam and Gilbert (Proc. Natl Acad. Sci USA (1977) 74:560) or Sanger (Sanger et al. (1977) Proc. Nat. Acad. Sci 74:5463). Any of a variety of automated sequencing procedures can be utilized when performing the assays (Biotechniques (1995) 19:448), including sequencing by mass spectrometry (see, for example, U.S. Pat. No. 5,547,835 and international patent application Publication Number WO 94/16101, entitled DNA Sequencing by Mass Spectrometry by H. Köster; U.S. Pat. No. 5,547,835 and international patent application Publication Number WO 94/21822 entitled DNA Sequencing by Mass Spectrometry Via Exonuclease Degradation by H. Köster), and U.S. Pat. No. 5,605,798 and International Patent Application No. PCT/US96/03651 entitled DNA Diagnostics Based on Mass Spectrometry by H. Köster; Cohen et al. (1996) Adv Chromatogr 36:127-162; and Griffin et al. (1993) Appl Biochem Biotechnol 38: 147-159).

[1254] Sequencing of nucleic acid molecules can also be carried out using next-generation sequencing (NGS). Next-generation sequencing includes any sequencing method that determines the nucleotide sequence of either individual nucleic acid molecules or clonally expanded proxies for individual nucleic acid molecules in a highly parallel fashion (e.g., greater than 10³ molecules are sequenced simultaneously). In one embodiment, the relative abundance of the nucleic acid species in the library can be estimated by counting the relative number of occurrences of their cognate sequences in the data generated by the sequencing experiment. Next generation sequencing methods are known in the art, and are described, e.g., in Metzker, M. (2010) Nature Biotechnology Reviews 11:31-46, incorporated herein by reference.

[1255] In one embodiment, the next-generation sequencing allows for the determination of the nucleotide sequence of an individual nucleic acid molecule (e.g., Helicos BioSciences' HeliScope Gene Sequencing system, and Pacific Biosciences' PacBio RS system). In other embodiments, the sequencing method determines the nucleotide sequence of clonally expanded proxies for individual nucleic acid molecules (e.g., the Solexa sequencer, Illumina Inc., San Diego, Calif.; 454 Life Sciences (Branford, Conn.), and Ion Torrent). e.g., massively parallel short-read sequencing (e.g., the Solexa sequencer, Illumina Inc., San Diego, Calif.), which generates more bases of sequence per sequencing unit than other sequencing methods that generate fewer but longer reads. Other methods or machines for next-generation sequencing include, but are not limited to, the sequencers provided by 454 Life Sciences (Branford, Conn.), Applied Biosystems (Foster City, Calif.; SOLiD sequencer), and Helicos BioSciences Corporation (Cambridge, Mass.).

[1256] Platforms for next-generation sequencing include, but are not limited to, Roche/454's Genome Sequencer (GS) FLX System, Illumina/Solexa's Genome Analyzer (GA), Life/APG's Support Oligonucleotide Ligation Detection (SOLiD) system, Polonator's G.007 system, Helicos BioSciences' HeliScope Gene Sequencing system, and Pacific Biosciences' PacBio RS system.

[1257] NGS technologies can include one or more of steps, e.g., template preparation, sequencing and imaging, and data analysis.

### Template Preparation

[1258] Methods for template preparation can include steps such as randomly breaking nucleic acids (e.g., genomic DNA or cDNA) into smaller sizes and generating sequencing templates (e.g., fragment templates or mate-pair templates). The spatially separated templates can be attached or immobilized to a solid surface or support, allowing massive amounts of sequencing reactions to be performed simultaneously. Types of templates that can be used for NGS reactions include, e.g., clonally amplified templates originating from single DNA molecules, and single DNA molecule templates.

[1259] Methods for preparing clonally amplified templates include, e.g., emulsion PCR (emPCR) and solid-phase amplification.

[1260] EmPCR can be used to prepare templates for NGS. Typically, a library of nucleic acid fragments is generated, and adapters containing universal priming sites are ligated to the ends of the fragment. The fragments are then denatured into single strands and captured by beads. Each bead captures a single nucleic acid molecule. After amplification and enrichment of emPCR beads, a large amount of templates can be attached or immobilized in a polyacrylamide gel on a standard microscope slide (e.g., Polonator), chemically crosslinked to an amino-coated glass surface (e.g., Life/APG; Polonator), or deposited into individual PicoTiterPlate (PTP) wells (e.g., Roche/454), in which the NGS reaction can be performed.

[1261] Solid-phase amplification can also be used to produce templates for NGS. Typically, forward and reverse primers are covalently attached to a solid support. The surface density of the amplified fragments is defined by the ratio of the primers to the templates on the support. Solid-phase amplification can produce hundreds of millions spatially separated template clusters (e.g., Illumina/Solexa). The ends of the template clusters can be hybridized to universal sequencing primers for NGS reactions.

[1262] Other methods for preparing clonally amplified templates also include, e.g., Multiple Displacement Amplification (MDA) (Lasken R. S. Curr Opin Microbiol. 2007; 10(5):510-6). MDA is a non-PCR based DNA amplification technique. The reaction involves annealing random hexamer primers to the template and DNA synthesis by high fidelity enzyme, typically (29 at a constant temperature. MDA can generate large sized products with lower error frequency.

[1263] Template amplification methods such as PCR can be coupled with NGS platforms to target or enrich specific regions of the genome (e.g., exons). Exemplary template enrichment methods include, e.g., microdroplet PCR technology (Tewhey R. et al., Nature Biotech. 2009, 27:1025-1031), custom-designed oligonucleotide microarrays (e.g., Roche/NimbleGen oligonucleotide microarrays), and solution-based hybridization methods (e.g., molecular inversion probes (MIPs) (Porreca G. J. et al., Nature Methods, 2007, 4:931-936; Krishnakumar S. et al., Proc. Natl. Acad. Sci. USA, 2008, 105:9296-9310; Turner E. H. et al., Nature Methods, 2009, 6:315-316), and biotinylated RNA capture sequences (Gnirke A. et al., Nat. Biotechnol. 2009; 27(2): 182-9)

[1264] Single-molecule templates are another type of templates that can be used for NGS reaction. Spatially separated single molecule templates can be immobilized on solid supports by various methods. In one approach, individual primer molecules are covalently attached to the solid support. Adapters are added to the templates and templates are then hybridized to the immobilized primers. In another approach, single-molecule templates are covalently attached to the solid support by priming and extending single-stranded, single-molecule templates from immobilized primers. Universal primers are then hybridized to the templates. In yet another approach, single polymerase molecules are attached to the solid support, to which primed templates are bound.

### Sequencing and Imaging

[1265] Exemplary sequencing and imaging methods for NGS include, but are not limited to, cyclic reversible termination (CRT), sequencing by ligation (SBL), single-molecule addition (pyrosequencing), and real-time sequencing.

[1266] CRT uses reversible terminators in a cyclic method that minimally includes the steps of nucleotide incorporation, fluorescence imaging, and cleavage. Typically, a DNA polymerase incorporates a single fluorescently modified nucleotide corresponding to the complementary nucleotide of the template base to the primer. DNA synthesis is terminated after the addition of a single nucleotide and the unincorporated nucleotides are washed away. Imaging is performed to determine the identity of the incorporated labeled nucleotide. Then in the cleavage step, the terminating/inhibiting group and the fluorescent dye are removed. Exemplary NGS platforms using the CRT method include, but are not limited to, Illumina/Solexa Genome Analyzer (GA), which uses the clonally amplified template method coupled with the four-color CRT method detected by total internal reflection fluorescence (TIRF); and Helicos BioSciences/HeliScope, which uses the single-molecule template method coupled with the one-color CRT method detected by TIRF.

[1267] SBL uses DNA ligase and either one-base-encoded probes or two-base-encoded probes for sequencing. Typically, a fluorescently labeled probe is hybridized to its complementary sequence adjacent to the primed template. DNA ligase is used to ligate the dye-labeled probe to the primer. Fluorescence imaging is performed to determine the identity of the ligated probe after non-ligated probes are washed away. The fluorescent dye can be removed by using cleavable probes to regenerate a 5′-PO₄ group for subsequent ligation cycles. Alternatively, a new primer can be hybridized to the template after the old primer is removed. Exemplary SBL platforms include, but are not limited to, Life/APG/SOLiD (support oligonucleotide ligation detection), which uses two-base-encoded probes.

[1268] Pyrosequencing method is based on detecting the activity of DNA polymerase with another chemiluminescent enzyme. Typically, the method allows sequencing of a single strand of DNA by synthesizing the complementary strand along it, one base pair at a time, and detecting which base was actually added at each step. The template DNA is immobile, and solutions of A, C, G, and T nucleotides are sequentially added and removed from the reaction. Light is produced only when the nucleotide solution complements the first unpaired base of the template. The sequence of solutions which produce chemiluminescent signals allows the determination of the sequence of the template. Exemplary pyrosequencing platforms include, but are not limited to, Roche/454, which uses DNA templates prepared by emPCR with 1-2 million beads deposited into PTP wells.

[1269] Real-time sequencing involves imaging the continuous incorporation of dye-labeled nucleotides during DNA synthesis. Exemplary real-time sequencing platforms include, but are not limited to, Pacific Biosciences platform, which uses DNA polymerase molecules attached to the surface of individual zero-mode waveguide (ZMW) detectors to obtain sequence information when phospholinked nucleotides are being incorporated into the growing primer strand; Life/VisiGen platform, which uses an engineered DNA polymerase with an attached fluorescent dye to generate an enhanced signal after nucleotide incorporation by fluorescence resonance energy transfer (FRET); and LI-COR Biosciences platform, which uses dye-quencher nucleotides in the sequencing reaction.

[1270] Other sequencing methods for NGS include, but are not limited to, nanopore sequencing, sequencing by hybridization, nano-transistor array based sequencing, polony sequencing, scanning tunneling microscopy (STM) based sequencing, and nanowire-molecule sensor based sequencing.

[1271] Nanopore sequencing involves electrophoresis of nucleic acid molecules in solution through a nano-scale pore which provides a highly confined space within which single-nucleic acid polymers can be analyzed. Exemplary methods of nanopore sequencing are described, e.g., in Branton D. et al., Nat Biotechnol. 2008; 26(10):1146-53.

[1272] Sequencing by hybridization is a non-enzymatic method that uses a DNA microarray. Typically, a single pool of DNA is fluorescently labeled and hybridized to an array containing known sequences. Hybridization signals from a given spot on the array can identify the DNA sequence. The binding of one strand of DNA to its complementary strand in the DNA double-helix is sensitive to even single-base mismatches when the hybrid region is short or is specialized mismatch detection proteins are present. Exemplary methods of sequencing by hybridization are described, e.g., in Hanna G. J. et al., J. Clin. Microbiol. 2000; 38 (7): 2715-21; and Edwards J. R. et al., Mut. Res. 2005; 573 (1-2): 3-12.

[1273] Polony sequencing is based on polony amplification and sequencing-by-synthesis via multiple single-base-extensions (FISSEQ). Polony amplification is a method to amplify DNA in situ on a polyacrylamide film. Exemplary polony sequencing methods are described, e.g., in US Patent Application Publication No. 2007/0087362.

[1274] Nano-transistor array based devices, such as Carbon NanoTube Field Effect Transistor (CNTFET), can also be used for NGS. For example, DNA molecules are stretched and driven over nanotubes by micro-fabricated electrodes. DNA molecules sequentially come into contact with the carbon nanotube surface, and the difference in current flow from each base is produced due to charge transfer between the DNA molecule and the nanotubes. DNA is sequenced by recording these differences. Exemplary Nano-transistor array based sequencing methods are described, e.g., in U.S. Patent Application Publication No. 2006/0246497.

[1275] Scanning tunneling microscopy (STM) can also be used for NGS. STM uses a piezo-electric-controlled probe that performs a raster scan of a specimen to form images of its surface. STM can be used to image the physical properties of single DNA molecules, e.g., generating coherent electron tunneling imaging and spectroscopy by integrating scanning tunneling microscope with an actuator-driven flexible gap. Exemplary sequencing methods using STM are described, e.g., in U.S. Patent Application Publication No. 2007/0194225.

[1276] A molecular-analysis device which is comprised of a nanowire-molecule sensor can also be used for NGS. Such device can detect the interactions of the nitrogenous material disposed on the nanowires and nucleic acid molecules such as DNA. A molecule guide is configured for guiding a molecule near the molecule sensor, allowing an interaction and subsequent detection. Exemplary sequencing methods using nanowire-molecule sensor are described, e.g., in U.S. Patent Application Publication No. 2006/0275779.

[1277] Double ended sequencing methods can be used for NGS. Double ended sequencing uses blocked and unblocked primers to sequence both the sense and antisense strands of DNA. Typically, these methods include the steps of annealing an unblocked primer to a first strand of nucleic acid; annealing a second blocked primer to a second strand of nucleic acid; elongating the nucleic acid along the first strand with a polymerase; terminating the first sequencing primer; deblocking the second primer; and elongating the nucleic acid along the second strand. Exemplary double ended sequencing methods are described, e.g., in U.S. Pat. No. 7,244.567.

### Data Analysis

[1278] After NGS reads have been generated, they can be aligned to a known reference sequence or assembled de novo.

[1279] For example, identifying genetic variations such as single-nucleotide polymorphism and structural variants in a sample (e.g., a tumor sample) can be accomplished by aligning NGS reads to a reference sequence (e.g., a wild-type sequence). Methods of sequence alignment for NGS are described e.g., in Trapnell C, and Salzberg S. L. Nature Biotech., 2009, 27:455-457.

[1280] Examples of de novo assemblies are described, e.g., in Warren R. et al., Bioinformatics, 2007, 23:500-501; Butler J. et al., Genome Res., 2008, 18:810-820; and Zerbino D. R, and Bimey E., Genome Res., 2008, 18:821-829.

[1281] Sequence alignment or assembly can be performed using read data from one or more NGS platforms, e.g., mixing Roche/454 and Illumina/Solexa read data.

[1282] Algorithms and methods for data analysis are described in U.S. Ser. No. 61/428,568, filed Dec. 30, 2010, incorporated herein by reference.

### Fusion Expression Level

[1283] In certain embodiments, expression level of a fusion described herein can also be assayed. Fusion expression can be assessed by any of a wide variety of methods for detecting expression of a transcribed molecule or protein. Non-limiting examples of such methods include immunological methods for detection of secreted, cell-surface, cytoplasmic, or nuclear proteins, protein purification methods, protein function or activity assays, nucleic acid hybridization methods, nucleic acid reverse transcription methods, and nucleic acid amplification methods.

[1284] In certain embodiments, activity of a particular gene is characterized by a measure of gene transcript (e.g., mRNA), by a measure of the quantity of translated protein, or by a measure of gene product activity. Fusion expression can be monitored in a variety of ways, including by detecting mRNA levels, protein levels, or protein activity, any of which can be measured using standard techniques. Detection can involve quantification of the level of gene expression (e.g., genomic DNA, cDNA. mRNA, protein, or enzyme activity), or, alternatively, can be a qualitative assessment of the level of gene expression, in particular in comparison with a control level. The type of level being detected will be clear from the context.

[1285] Methods of detecting and/or quantifying the fusion gene transcript (mRNA or cDNA made therefrom) using nucleic acid hybridization techniques are known to those of skill in the art (see Sambrook et al. supra). For example, one method for evaluating the presence, absence, or quantity of cDNA involves a Southern transfer as described above. Briefly, the mRNA is isolated (e.g., using an acid guanidinium-phenol-chloroform extraction method, Sambrook et al. supra.) and reverse transcribed to produce cDNA. The cDNA is then optionally digested and run on a gel in buffer and transferred to membranes. Hybridization is then carried out using the nucleic acid probes specific for the cDNA of a fusion described herein, e.g., using the probes and primers described herein.

[1286] In other embodiments, expression of a fusion molecule described herein is assessed by preparing genomic DNA or mRNA/cDNA (i.e., a transcribed polynucleotide) from cells in a subject sample, and by hybridizing the genomic DNA or mRNA/cDNA with a reference polynucleotide which is a complement of a polynucleotide comprising the fusion, and fragments thereof. cDNA can, optionally, be amplified using any of a variety of polymerase chain reaction methods prior to hybridization with the reference polynucleotide. Expression of a fusion as described herein can likewise be detected using quantitative PCR (QPCR) to assess the level of expression.

### Detection of Fusion Polypeptide

[1287] The activity or level of a fusion polypeptide described herein can also be detected and/or quantified by detecting or quantifying the expressed polypeptide. The fusion polypeptide can be detected and quantified by any of a number of means known to those of skill in the art. These can include analytic biochemical methods such as electrophoresis, capillary electrophoresis, high performance liquid chromatography (HPLC), thin layer chromatography (TLC), hyperdiffusion chromatography, and the like, or various immunological methods such as fluid or gel precipitin reactions, immunodiffusion (single or double), immunoelectrophoresis, radioimmunoassay (RIA), enzyme-linked immunosorbent assays (ELISAs), immunofluorescent assays, Western blotting, immunohistochemistry (IHC) and the like. A skilled artisan can adapt known protein/antibody detection methods.

[1288] Another agent for detecting a fusion polypeptide is an antibody molecule capable of binding to a polypeptide corresponding to a marker, e.g., an antibody with a detectable label. Techniques for generating antibodies are described herein. The term “labeled”, with regard to the probe or antibody, is intended to encompass direct labeling of the probe or antibody by coupling (i.e., physically linking) a detectable substance to the probe or antibody, as well as indirect labeling of the probe or antibody by reactivity with another reagent that is directly labeled. Examples of indirect labeling include detection of a primary antibody using a fluorescently labeled secondary antibody and end-labeling of a DNA probe with biotin such that it can be detected with fluorescently labeled streptavidin.

[1289] In another embodiment, the antibody is labeled, e.g., a radio-labeled, chromophore-labeled, fluorophore-labeled, or enzyme-labeled antibody. In another embodiment, an antibody derivative (e.g., an antibody conjugated with a substrate or with the protein or ligand of a protein-ligand pair {e.g., biotin-streptavidin}), or an antibody fragment (e.g., a single-chain antibody, an isolated antibody hypervariable domain, etc.) which binds specifically with a fusion protein described herein, is used.

[1290] Fusion polypeptides from cells can be isolated using techniques that are known to those of skill in the art. The protein isolation methods employed can, for example, be such as those described in Harlow and Lane (Harlow and Lane, 1988, Antibodies: A Laboratory Manual, Cold Spring Harbor Laboratory Press, Cold Spring Harbor, New York).

[1291] Means of detecting proteins using electrophoretic techniques are well known to those of skill in the art (see generally, R. Scopes (1982) Protein Purification, Springer-Verlag, N.Y.; Deutscher, (1990) Methods in Enzymology Vol. 182: Guide to Protein Purification, Academic Press, Inc., N.Y.).

[1292] In another embodiment, Western blot (immunoblot) analysis is used to detect and quantify the presence of a polypeptide in the sample.

[1293] In another embodiment, the polypeptide is detected using an immunoassay. As used herein, an immunoassay is an assay that utilizes an antibody to specifically bind to the analyte. The immunoassay is thus characterized by detection of specific binding of a polypeptide to an anti-antibody as opposed to the use of other physical or chemical properties to isolate, target, and quantify the analyte.

[1294] The fusion polypeptide is detected and/or quantified using any of a number of immunological binding assays (see, e.g., U.S. Pat. Nos. 4,366,241; 4,376,110; 4,517,288; and 4,837,168). For a review of the general immunoassays, see also Asai (1993) Methods in Cell Biology Volume 37: Antibodies in Cell Biology, Academic Press, Inc. New York; Stites & Terr (1991) Basic and Clinical Immunology 7th Edition.

### Kits

[1295] In one aspect, the invention features, a kit, e.g., containing an oligonucleotide having a mutation described herein, e.g., a fusion molecule described herein. Optionally, the kit can also contain an oligonucleotide that is the wild type counterpart of the mutant oligonucleotide.

[1296] A kit featured in the invention can include a carrier, e.g., a means being compartmentalized to receive in close confinement one or more container means. In one embodiment the container contains an oligonucleotide, e.g., a primer or probe as described above. The components of the kit are useful, for example, to diagnose or identify a mutation in a tumor sample in a patient. The probe or primer of the kit can be used in any sequencing or nucleotide detection assay known in the art, e.g., a sequencing assay, e.g., an NGS method, RT-PCR, or in situ hybridization.

[1297] In some embodiments, the components of the kit are useful, for example, to diagnose or identify a fusion described herein in a tumor sample in a patient, and to accordingly identify an appropriate therapeutic agent to treat the cancer.

[1298] A kit featured in the invention can include, e.g., assay positive and negative controls, nucleotides, enzymes (e.g., RNA or DNA polymerase or ligase), solvents or buffers, a stabilizer, a preservative, a secondary antibody, e.g., an anti-HRP antibody (IgG) and a detection reagent.

[1299] An oligonucleotide can be provided in any form, e.g., liquid, dried, semi-dried, or lyophilized, or in a form for storage in a frozen condition.

[1300] Typically, an oligonucleotide, and other components in a kit are provided in a form that is sterile. An oligonucleotide, e.g., an oligonucleotide that contains a mutation, e.g., a fusion described herein, or an oligonucleotide complementary to a fusion described herein, is provided in a liquid solution, the liquid solution generally is an aqueous solution, e.g., a sterile aqueous solution. When the oligonucleotide is provided as a dried form, reconstitution generally is accomplished by the addition of a suitable solvent. The solvent, e.g., sterile buffer, can optionally be provided in the kit.

[1301] The kit can include one or more containers for the composition containing an oligonucleotide in a concentration suitable for use in the assay or with instructions for dilution for use in the assay. In some embodiments, the kit contains separate containers, dividers or compartments for the oligonucleotide and assay components, and the informational material. For example, the oligonucleotides can be contained in a bottle or vial, and the informational material can be contained in a plastic sleeve or packet. In other embodiments, the separate elements of the kit are contained within a single, undivided container. For example, an oligonucleotide composition is contained in a bottle or vial that has attached thereto the informational material in the form of a label. In some embodiments, the kit includes a plurality (e.g., a pack) of individual containers, each containing one or more unit forms (e.g., for use with one assay) of an oligonucleotide. For example, the kit includes a plurality of ampoules, foil packets, or blister packs, each containing a single unit of oligonucleotide for use in sequencing or detecting a mutation in a tumor sample. The containers of the kits can be air tight and/or waterproof. The container can be labeled for use.

[1302] For antibody-based kits, the kit can include: (1) a first antibody (e.g., attached to a solid support) which binds to a fusion polypeptide; and, optionally, (2) a second, different antibody which binds to either the polypeptide or the first antibody and is conjugated to a detectable agent.

[1303] In one embodiment, the kit can include informational material for performing and interpreting the sequencing or diagnostic. In another embodiment, the kit can provide guidance as to where to report the results of the assay, e.g., to a treatment center or healthcare provider. The kit can include forms for reporting the results of a sequencing or diagnostic assay described herein, and address and contact information regarding where to send such forms or other related information; or a URL (Uniform Resource Locator) address for reporting the results in an online database or an online application (e.g., an app). In another embodiment, the informational material can include guidance regarding whether a patient should receive treatment with a particular chemotherapeutic drug, depending on the results of the assay.

[1304] The informational material of the kits is not limited in its form. In many cases, the informational material, e.g., instructions, is provided in printed matter, e.g., a printed text, drawings, and/or photographs, e.g., a label or printed sheet. However, the informational material can also be provided in other formats, such as computer readable material, video recording, or audio recording. In another embodiment, the informational material of the kit is contact information, e.g., a physical address, email address, website, or telephone number, where a user of the kit can obtain substantive information about the sequencing or diagnostic assay and/or its use in the methods described herein. The informational material can also be provided in any combination of formats.

[1305] In some embodiments, a biological sample is provided to an assay provider, e.g., a service provider (such as a third party facility) or a healthcare provider, who evaluates the sample in an assay and provides a read out. For example, in one embodiment, an assay provider receives a biological sample from a subject, such as a blood or tissue sample, e.g., a biopsy sample, and evaluates the sample using an assay described herein, e.g., a sequencing assay or in situ hybridization assay, and determines that the sample contains a fusion described herein. The assay provider, e.g., a service provider or healthcare provider, can then conclude that the subject is, or is not, a candidate for a particular drug or a particular cancer treatment regimen.

[1306] The assay provider can provide the results of the evaluation, and optionally, conclusions regarding one or more of diagnosis, prognosis, or appropriate therapy options to, for example, a healthcare provider, or patient, or an insurance company, in any suitable format, such as by mail or electronically, or through an online database. The information collected and provided by the assay provider can be stored in a database.

[1307] Incorporated by reference herein in their entirety are any polynucleotide and polypeptide sequences which reference an accession number correlating to an entry in a public database, such as those maintained by the COSMIC database, available on the worldwide web at sanger.ac.uk/genetics/CGP/cosmic/; and the Institute for Genomic Research (TIGR) on the world wide web at tigr.org and/or the National Center for Biotechnology Information (NCBI) on the world wide web at ncbi.nlm.nih.gov.

### EXAMPLES

### Example 1

### Kinase Fusion is a Common Feature in Spitz Neoplasms

[1308] Spitzoid neoplasms are a group of melanocytic tumors with distinctive histopathologic features. They include benign tumors (Spitz nevi), malignant tumors (spitzoid melanomas), and tumors with borderline histopathologic features and uncertain clinical outcome (atypical Spitz tumors). Their genetic underpinnings are poorly understood, and alterations in common melanoma-associated oncogenes are typically absent.

[1309] This invention discovers that spitzoid neoplasms harbor kinase fusions of ROS1 (17%), NTRK1 (16%), ALK (10%), BRAF (5%), and RET (3%) in a mutually exclusive pattern. The chimeric proteins are constitutively active, stimulate oncogenic signaling pathways, are tumorigenic, and are found in the entire biologic spectrum of spitzoid neoplasms, including 55% of Spitz nevi, 56% of atypical Spitz tumors, and 39% of spitzoid melanomas. Kinase inhibitors suppress the oncogenic signaling of the fusion proteins in vitro. In summary, kinase fusions account for the majority of oncogenic aberrations in spitzoid neoplasms, and may serve as therapeutic targets for metastatic spitzoid melanomas.

[1310] Melanocytic neoplasms comprise several tumor types that are characterized by distinct clinical, pathologic, and genetic features. The clinical course of melanocytic tumors may be indolent (benign nevi), aggressive (malignant melanomas), or intermediate (melanocytic tumors of uncertain malignant potential). In 1948, Sophie Spitz, a pathologist from Memorial Sloan-Kettering Cancer Center, coined the term ‘melanoma of childhood’ for a group of melanocytic skin tumors composed of spindled or epithelioid melanocytes that developed predominantly in children and adolescents (Spitz, S. Am J Pathol 24, 591-609 (1948)). It later became clear that these tumors could also arise later in life, and that the majority of these neoplasms behaved in an indolent fashion, which led to the introduction of the term ‘Spitz nevus’ to indicate their benign nature. Malignant tumors with spitzoid histologic features were termed ‘spitzoid melanomas’, and these tumors often showed aggressive clinical behavior with widespread metastasis, similar to conventional melanomas. Tumors with histologic features overlapping those of Spitz nevi and spitzoid melanoma have been termed ‘atypical Spitz tumors’. Atypical Spitz tumors have the capacity to metastasize, but this is usually limited to the regional lymph nodes, and has little effect on patient survival (Ludgate, M. W. et al. Cancer 115, 631-41 (2009); Murali, R. et al. Ann Surg Oncol 15, 302-9 (2008)).

[1311] Genetic alterations in the majority of spitzoid neoplasms are not known, and they lack mutations in melanoma-associated oncogenes such as NRAS, KIT, GNAQ or GNA11 (Flaherty, K. T. et al., Cancer 12, 349-61 (2012)). However, subsets of spitzoid neoplasms characterized by distinct histopathologic features show HRAS mutations (Bastian, B. C. et al., Am J Pathol 157, 967-72 (2000)), or BRAF mutations combined with bi-allelic BAP1 loss (Wiesner, T. et al. Nat Genet 43, 1018-21 (2011); Wiesner, T. et al., Am J Surg Pathol 36, 818-30 (2012)), suggesting that activation of kinase pathways plays an important role in the pathogenesis of these tumors. It is anticipated that identification of additional genetic events in kinase pathways will contribute to a better understanding of the pathogenesis of spitzoid neoplasms, and facilitate the development of effective targeted therapies for primary and metastasizing tumors, as illustrated by the success of small molecule kinase inhibitors in prolonging the lives of patients with a broad range of malignancies (Chapman, P. B. et al., N Engl J Med 364, 2507-16 (2011); Kwak, E. L. et al. N Engl J Med 363, 1693-703 (2010); Druker, B. J. et al., N Engl J Med 344, 1031-7 (2001)).

[1312] For diagnostic reasons, spitzoid neoplasms are usually formalin-fixed and paraffin-embedded (FFPE) in their entirety, and nucleic acids isolated from FFPE tissue are typically degraded and of suboptimal quality. In addition, the percentage of neoplastic cells in spitzoid neoplasms is frequently low, due to the presence of varying numbers of admixed non-neoplastic lymphocytes, fibroblasts, and keratinocytes. The suboptimal quality of extracted nucleic acids and the low proportion of neoplastic melanocytic cells makes the identification of genetic aberrations in spitzoid neoplasms challenging and therefore a high sequencing coverage is necessary. For these reasons, a massively parallel sequencing approach was chosen with high sequencing coverage for previously described cancer genes to investigate genetic aberrations in spitzoid neoplasms.

[1313] In a discovery cohort of 30 Spitz nevi and 8 atypical Spitz tumors, genomic alterations were investigated by targeted massively parallel sequencing. Table 2 summarizes the clinical, histopathologic and genetic data. The findings were further validated in an independent cohort of 102 spitzoid neoplasms using interphase FISH (Table 3 summarizes the clinical, histopathologic and genetic data).

[1314] For targeted DNA sequencing, 3230 exons from 182 cancer-related genes and 37 introns of 14 genes commonly rearranged genes in cancer were sequenced. An average unique coverage of 997×, with 99.96% of exons being sequenced at ≧100× coverage. In addition, targeted transcriptome sequencing for 612 transcripts of kinases and kinase-related genes achieved an average of 56,588,548 unique read pairs per spitzoid neoplasm. Six tumors (16%) harbored HRAS c.182A>T (p.Q61L) mutations and exhibited histopathologic features characteristic of the previously-described HRAS-mutant Spitz nevus variant (Bastian, B. C. et al., Am J Pathol 157, 967-72 (2000)). Additionally, mutations in PKHD1, ERBB4, LRP1B, and amplifications of MCL1 and CCNE1 were identified in one case each (FIG. 2a). No sequence alterations were found in the known melanoma oncogenes BRAF, NRAS, KIT, GNAQ, or GNA11 or in other cancer-related genes listed in Table 4.

[1315] Kinase fusions were identified in 18 of 30 (60%) Spitz nevi and in 6 of 8 (75%) atypical Spitz tumors (FIGS. 2a and 2b). The rearrangements included gene fusions of the membrane-bound receptor tyrosine kinases ROS1 (n=11, 29%), ALK (n=6, 16%), NTRK1 (n=3, 8%), and RET (n=2, 5%). Two spitzoid neoplasms harbored t(7; 19(q34; q13) translocations that involved the serine/threonine kinase BRAF, but with different 5′-partners (CEP89 and LSM14A) in each tumor. RT-PCR with breakpoint flanking primers were used to verify that the fusion genes were expressed and produced in-frame transcripts. Interphase FISH with breakpoint-flanking probes was used to confirm the disruptions at the ROS1, ALK, NTRK1, RET, and BRAF loci.

[1316] An independent cohort of 102 spitzoid neoplasms was used to validate the foregoing findings using interphase FISH (Table 3 summarizes the clinical, histopathologic and genetic data). In total, 140 spitzoid neoplasms were analyzed leading to the identification of fusions in 41 of 75 (55%) Spitz nevi, in 18 of 32 (56%) atypical Spitz tumors, and in 13 of 33 (39%) spitzoid melanomas (Table 1). Expression of the chimeric ROS1, NTRK1, ALK, and RET proteins was confirmed using immunohistochemistry. Cases harboring translocations showed moderate to strong staining for the corresponding fusion kinase, which was not observed in the cases lacking gene rearrangements. Patients with translocation-positive spitzoid neoplasms were younger (median 21 years) than patients whose tumors did not harbor translocations (median 32.5 years; Mann Whitney test P<0.001).

[1317] The methodology for identifying the fusion proteins is described below. The excised skin lesions were fixed in 4% neutral buffered formalin, embedded in paraffin, processed using routine histologic methods and stained with hematoxylin-eosin. Specimens were collected over a time period of 6 months and the histopathologic diagnosis of Spitz nevus, atypical Spitz tumor, and spitzoid melanoma was confirmed by at least three dermatopathologists. Specimens with insufficient tissue amount or severely degraded nucleic acids were excluded. In total, specimens from 140 patients were analyzed and the clinical, histologic, and genetic characteristics are summarized in Table 2 and Table 3.

[1318] 3230 exons from 182 cancer-related genes (Table 4) and 37 introns of 14 genes (Table 5) commonly rearranged genes in cancer were sequenced with average depth-of-coverage of greater than 500×. Prior to DNA extraction, FFPE samples from all cases were reviewed to confirm that the tissue was of sufficient size to generate a minimum of 50 ng of DNA and that this DNA would be derived from areas that contained a minimum of 20% melanocytic nuclei. DNA was isolated from 40 μm thick sections of formalin-fixed, paraffin-embedded (FFPE) tissue. DNA sequencing was performed on indexed, adaptor ligation, hybridization-captured libraries (Agilent SureSelect custom kit). Sequencing was performed on the HiSeq-2000 instrument (Illumina), with 49×49 paired reads to an average depth of 997× (Table 6).

[1319] Total RNA extracted from 40 μm thick sections of FFPE tumor was reverse-transcribed with random hexamer primers using the SuperScript® III First-Strand Synthesis System (Invitrogen). Double stranded cDNA was synthesized with the NEBNext® mRNA Second Strand Synthesis Module (New England Biolabs) (D'Alessio, J. M. & Gerard, G. F. Nucleic Acids Res 16, 1999-2014 (1988)). Hybrid selection of indexed, adaptor-ligated libraries was performed using the cDNA Kinome hybridization kit with 612 transcripts of kinases and kinase-related genes (Agilent SureSelect Human Kinome Kit) (Levin, J. Z. et al. Genome Biol 10, R115 (2009)). Selected libraries were sequenced on the HiSeq-2000 instrument (Illumina) with 49×49 paired reads. For RNA sequencing, a sequencing approach targeting 612 transcripts of kinases and kinase-related genes was used. A high number of unique read pairs (≧50,000,000) was sought per sample (Table 7).

[1320] Sequence data from gDNA and cDNA was mapped to the reference human genome (hg19) using the BWA aligner and processed using publically available SAMtools (Li, H. et al. Bioinformatics 25, 2078-9 (2009)), Picard (http://picard.sourceforge.net) and GATK (McKenna, A. et al. Genome Res 20, 1297-303 (2010)). Genomic base substitutions and indels were detected using custom tools optimized for mutation calling in heterogeneous tumor samples, based on detecting common sequence variations and local sequence assembly. Variations were filtered using dbSNP and a custom artifact database, then annotated for known and likely somatic mutations using COSMIC. Copy number alterations were detected by comparing targeted genomic DNA sequence coverage with a process-matched normal control sample. Genomic rearrangements were detected by clustering chimeric reads mapping to targeted introns/exons. Expression levels were determined by analyzing cDNA sequence coverage of targeted exons. Table 11 summarizes the predicted genomic coordinates of the fusion genes.

[1321] All gene fusions were validated by qRT-PCR from cDNA using the primers listed in Table 8 and analysis on a Bioanalyzer (Agilent). Specific PCR amplicons were only detected with the appropriate combination of primers and template, and not with negative controls. The nucleotide sequence at the fusion site was confirmed by Sanger sequencing.

[1322] These results show that kinase fusions are important mechanisms of oncogene activation in spitzoid neoplasms. In aggregate, 72 of 140 (51.4%) spitzoid neoplasms harbored fusions involving the receptor tyrosine kinases ROS1 (17%), NTRK1 (16%), ALK (10%), RET (3%), and the serine/threonine kinase BRAF (5%). All fusions occurred in a mutually exclusive pattern (FIG. 2a), and no fusions were detected in tumors with HRAS mutations. All of the sequenced kinase fusions created chimeric proteins that retained the intact kinase domain at the 3′ end of the fusion transcript (FIG. 2b), a pattern similar to that observed in other cancers that harbor rearrangements involving these kinases (Lipson, D. et al., Nat Med 18, 382-4 (2012); Soda, M. et al., Nature 448, 561-6 (2007); Takeuchi, K. et al., Nat Med 18, 378-81 (2012)). All recombination sites between kinases and translocation partners involved the canonical intronic recombination sites, similar to those described in other types of cancers (ROS1: intron 33-35; ALK: intron 19; NTRK1: intron 8-10; RET: intron 11; BRAF: intron 8) (Forbes, S. A. et al., Nucleic Acids Res 39, D945-50 (2011)). The majority of the novel 5′ fusion partners identified in our study, namely those of ROS1 (PWWP2A, PPFIBP1, ERC1, MYO5A, CLIP1, HLA-A, KIAA1598 and ZCCHC8), ALK (DCTN1), NTRK (LMNA), and BRAF (CEP89 and LSM14A) contributed coiled-coil domains to the fusion proteins. The coiled-coil domains may play similar roles to the established 5′ fusion partners (TPM3 (Lamant, L. et al., Blood 93, 3088-95 (1999)), GOLGA5 (Rabes, H. M. et al., Clin Cancer Res 6, 1093-103 (2000)), KIF1B(Lipson. D. et al., Nat Med 18, 382-4 (2012)) of these kinases in promoting dimerization and auto-activation of the kinases (Cohen, C. & Parry, D. A. Science 263, 488-9 (1994); McWhirter, J. R., Galasso, D. L. & Wang, J. Y. Mol Cell Biol 13, 7587-95 (1993)).

[1323] Rearrangements of the kinases ROS1, ALK, NTRK1, RET and BRAF with similar fusion sites have previously been described in various types of aggressive tumors. ROS1 fusions have been described in various cancer types, including lung carcinoma (Rikova, K. et al. Cell 131, 1190-203 (2007)), glioblastoma (Birchmeier, C., Sharma, S. & Wigler, M. Proc Natl Acad. Sci USA 84, 9270-4 (1987)), and cholangiocarcinoma (Gu, T. L. et al. PLoS One 6, e15640 (2011)). ALK fusions have been described in anaplastic large cell lymphoma (Lamant, L. et al., Blood 93, 3088-95 (1999), lung cancer (Soda, M. et al., Nature 448, 561-6 (2007)), inflammatory myofibroblastic tumors (Lawrence, B. et al. Am J Pathol 157, 377-84 (2000)) and anecdotal studies have also reported ALK fusions in acral melanoma (Niu, H. T. et al. Pigment Cell Melanoma Res (2013)). RET fusions, including the pericentric inversions giving rise to the KIF5B-RET fusion observed in spitzoid neoplasms, have been shown to drive lung cancer formation (Lipson, D. et al., Nat Med 18, 382-4 (2012); Takeuchi, K. et al., Nat Med 18, 378-81 (2012); Kohno, T. et al. Nat Med 18, 375-7 (2012)), and an interchromosomal GOLGA5-RET rearrangement was first described in papillary thyroid carcinomas occurring in children exposed to radioactive fallout from the Chernobyl nuclear accident (Rabes, H. M. et al. Clin Cancer Res 6, 1093-103 (2000)). BRAF fusions have been identified in pilocytic astrocytomas (Jones, D. T. et al. Cancer Res 68, 8673-7 (2008)), papillary thyroid carcinoma (Ciampi, R. et al. J Clin Invest 115, 94-101 (2005)), and rarely in melanocytic tumors (Palanisamy, N. et al. Nat Med 16, 793-8 (2010); Botton, T. et al. Pigment Cell Melanoma Res (2013)). In addition, these data that patients with translocation-positive spitzoid neoplasms were younger than patients whose tumors lacked translocations is similar to observations that lung cancers (Takeuchi, K. et al., Nat Med 18, 378-81 (2012)), thyroid cancers (Rabes. H. M. et al., Clin Cancer Res 6, 1093-103 (2000)), and astrocytomas (Jones, D. T. et al. Cancer Res 68, 8673-7 (2008)) harboring kinase fusions are more common in younger patients.

[1324] In summary, genomic analysis of 140 spitzoid neoplasms reveals gene rearrangements of the kinases ROS1 (17%; n=24), NTRK (16%; n=23), ALK (10%; n=14), BRAF (5%; n=7), and RET (3%; n=4) resulting in in-frame kinase fusions. These kinase fusions occur across the entire biologic spectrum of spitzoid neoplasms, including Spitz nevi (55%, fusions in 41 of 75 cases), atypical Spitz tumors (56%; fusions in 18 of 32 cases), and spitzoid melanomas (39%; fusions in 13 of 33 cases). The chimeric proteins appear in a mutually exclusive pattern, are constitutively active, stimulate oncogenic signaling pathways, are tumorigenic and may serve as diagnostic markers and as therapeutic targets for aggressive or metastasizing Spitz tumors.

TABLE 1
Frequency of kinase fusions in spitzoid neoplasms.

| | | Atypical | Spitzoid | |
|---|---|---|---|---|
| | Spitz nevus | Spitz tumor | melanoma | Total |
| | (n = 75) | (n = 32) | (n = 32) | (n= 140) |
| | % (number | % (number | % (number | % (number |
| Fusion | of cases) | of cases) | of cases) | of cases) |
| ROS1 | 25.3% (19) | 6.3% (2) | 9.1% (3) | 17.1% (24) |
| ALK | 10.7% (8) | 15.6% (5) | 3% (1) | 10% (14) |
| NTRK1 | 10.7% (8) | 25% (8) | 21.2% (7) | 16.4% (23) |
| BRAF | 5.3% (4) | 6.3% (2) | 3% (1) | 5% (7) |
| RET | 2.7% (2) | 3.1% (1) | 3% (1) | 2.9% (4) |
| Total | 54.7% (41) | 56.3% (18) | 39.4% (13) | 51.4% (72) |

TABLE 2
Clinical and histopathological characteristics of the analyzed Spitz tumors using targeted next generation sequencing.

| | | | | | | Translocation/ | RT- | | |
|---|---|---|---|---|---|---|---|---|---|
| # | Sex | Age | Localization | Diagnosis | Histopathologic features | Mutation | PCR | FISH | IHC |
| 1 | M | 9 | Back, | Pigmented | Symmetrical and well-circumscribed lesion | CLIP1- | + | + | + |
| | | | left | Spindle | composed of nests of spindled and epithelioid, | ROS1 | | | |
| | | | | Cell Nevus | pigmented melanocytes along the epidermal- | | | | |
| | | | | | dermal junction and in the epidermis. Multiple | | | | |
| | | | | | Kamino bodies. | | | | |
| 2 | F | 19 | Arm, | Spitz nevus, | Dome-shaped, well-circumscribed compound | PPFIBP1- | + | + | + |
| | | | lower left | compound | proliferation of large epithelioid melanocytes | ROS1 | | | |
| | | | | | with vesicular nuclei with irregular epidermal | | | | |
| | | | | | hyperplasia. Permeative lymphocytic infiltrate. | | | | |
| 3 | F | 47 | Buttock, | Spitz nevus, | Well circumscribed junctional proliferating of | TPM3- | + | + | + |
| | | | right | junctional | large spindled and epithelioid melanocytes, some | ROS1 | | | |
| | | | | | of which have pleomorphic nuclei; slight | | | | |
| | | | | | epidermal hyperplasia. | | | | |
| 4 | F | 39 | Leg, | Spitz nevus, | Well-circumscribed, symmetrical compound | ZCCHC8- | + | + | + |
| | | | lower left | compound | proliferation of large spindled and epithelioid | ROS1 | | | |
| | | | | | melanocytes with pleomorphic nuclei and | | | | |
| | | | | | prominent nucleoli arranged in large, partially | | | | |
| | | | | | confluent nests. Irregular epidermal hyperplasia. | | | | |
| 5 | F | 21 | Leg, | Pigmented | Well-circumscribed, symmetrical compound | MYO5A- | + | + | + |
| | | | upper left | Spindle | proliferation of large spindled and epithelioid, | ROS1 | | | |
| | | | | Cell Nevus | hyperpigmented melanocytes arranged along the | | | | |
| | | | | | dermo-epidermal junction. Irregular epidermal | | | | |
| | | | | | hyperplasia. Kamino bodies. | | | | |
| 6 | M | 21 | n.a. | Atypical | Dome-shaped, asymmetrical compound | PWWP2A- | + | + | + |
| | | | | Spitz tumor | proliferation of large epithelioid melanocytes | ROS1 | | | |
| | | | | | with marked nuclear pleomorphism, | | | | |
| | | | | | hyperchromasia, and prominent nuclei. Lack of | | | | |
| | | | | | maturation. Epidermal hyperplasia and fibrosis | | | | |
| | | | | | of the dermis. | | | | |
| 7 | F | 8 | Leg, | Spitz nevus, | Symmetrical and well circumscribed compound | PPFIBP1- | + | + | + |
| | | | left | compound | proliferation of large spindled and epithelioid | ROS1 | | | |
| | | | | | melanocytes with large and pleomorphic nuclei. | | | | |
| 8 | M | 12 | Arm, | Spitz nevus, | Kamino bodies are present. | HLA-A- | + | + | + |
| | | | lower left | compound | Symmetrical and well circumscribed compound | ROS1 | | | |
| | | | | | proliferation of large epithelioid melanocytes | | | | |
| | | | | | with prominent nucleoli. Marked papillated | | | | |
| | | | | | epidermal hyperplasia. | | | | |
| 9 | M | 12 | Leg, | Spitz nevus, | Asymmetrical compound proliferation of | ERC1- | + | + | + |
| | | | lower left | compound | medium sized spindled and epithelioid | ROS1 | | | |
| | | | | | melanocytes with scattered enlarged nuclei. | | | | |
| | | | | | Permeative lymphocytic infiltrate. | | | | |
| 10 | F | 1 | Cheek, | Spitz nevus, | Asymmetrieal compound proliferation of large | PWWP2A- | + | + | + |
| | | | right | compound | spindled and epithelioid melanocytes with large | ROS1 | | | |
| | | | | | pleomorphic nuclei and a permeative | | | | |
| | | | | | lymphocytic infiltrate. | | | | |
| 11 | F | 17 | Leg, | Spitz nevus, | Symmetrical and well circumscribed compound | KIAA1598- | n.d. | n.d. | n.d |
| | | | lower right | compound | proliferation of large epithelioid melanocytes | ROS1 | | | |
| | | | | | with large and pleomorphic nuclei. Epidermal | | | | |
| | | | | | hyperplasia. | | | | |
| 12 | M | 14 | Buttock, | Atypical | Symmetrical, exophytic, predominantly | TPM3- | + | + | + |
| | | | right | Spitz tumor | intradermal of spindled and epithelioid cells with | ALK | | | |
| | | | | | vesicular nuclei and prominent nucleoli. Irregular | | | | |
| | | | | | epidermal hyperplasia. | | | | |
| 13 | M | 2 | Arm, | Atypical | Well circumscribed melalanocytic tumor. In the | TPM3- | + | + | + |
| | | | lower left | Spitz tumor | dermis nests of large spindle-shaped cells with | ALK | | | |
| | | | | | vesicular nuclei and prominent nucleoli arranged | | | | |
| | | | | | in fascicles streaming downward into the dermis. | | | | |
| | | | | | Edematous papillary dermis and marked irregular | | | | |
| | | | | | epidermal hyperplasia. | | | | |
| 14 | F | 16 | Buttock, | Spitz nevus, | Symmetrical and well circumscribed compound | TPM3- | + | + | + |
| | | | left | compound | proliferation of large spindled and epithelioid | ALK | | | |
| | | | | | melanocytes with large and pleomorphic nuclei. | | | | |
| | | | | | Epidermal hyperplasia. | | | | |
| 15 | F | 14 | n.a. | Spitz nevus, | Re-excision of a desmoplastic Spitz nevus. | TPM3- | + | + | + |
| | | | | desmoplastic | Spindled and epithelioid melanocytes with | ALK | | | |
| | | | | | desmoplastic stroma. Few Melanophages. | | | | |
| 16 | M | 19 | Arm, | Atypical | Asymmetrical compound proliferation composed | DCTN1- | + | + | + |
| | | | upper left | Spitz tumor | of large confluent nests of spindled epithelioid | ALK | | | |
| | | | | | melanocytes with abundant cytoplasm and | | | | |
| | | | | | vesicular nuclei with prominent nucleoli; | | | | |
| | | | | | permeative lymphocytic infiltrate and irregular | | | | |
| | | | | | epidermal hyperplasia. | | | | |
| 17 | M | 9 | n.a. | Atypical | Exophytic, focally ulcerated compound | DCTN1- | + | + | + |
| | | | | Spitz tumor | proliferation of spindled and eptihelioid cells | ALK | | | |
| | | | | | arranged in elongated nests, streaming downward | | | | |
| | | | | | into the dermis. Permeative lymphocytic | | | | |
| | | | | | infiltrate and marked irregular epidermal | | | | |
| | | | | | hyperplasia. | | | | |
| 18 | F | 24 | Foot, | Spitz nevus, | Symmetrical and well circumscribed compound | TP53- | + | + | + |
| | | | left | compound | proliferation of spindled and epithelioid | NTRK1 | | | |
| | | | | | melanocytes melanocytic arranged in large nests. | | | | |
| | | | | | Marked lymphocytic infiltrate. | | | | |
| 19 | M | 2 | n.a. | Atypical | Exophytic, compound proliferation of small | LMNA- | + | n.d. | n.d. |
| | | | | Spitz tumor | epithelioid cells with pleomorphic nuclei | NTRK1 | | | |
| | | | | | arranged in large, confluent nests. Marked | | | | |
| | | | | | irregular epidermal hyperplasia with thin, | | | | |
| | | | | | elongated rete ridges. | | | | |
| 20 | F | 23 | Leg, | Spitz nevus, | Symmetrical, well circumscribed compound | LMNA- | + | + | + |
| | | | upper right | compound | proliferation of large epithelioid melanocytes | NTRK1 | | | |
| | | | | | with large and pleomorphic nuclei. Epidermal | | | | |
| | | | | | hyperplasia. Lymphocytic infiltrate. | | | | |
| 21 | M | 50 | n.a. | Pigmented | Symmetrical and well circumscribed compound | GOLGA5- | + | + | + |
| | | | | Spindle Cell | proliferation of spindled and epithelioid, | RET | | | |
| | | | | Nevus | pigmented melanocytes with slight epidermal | | | | |
| | | | | | hyperplasia. | | | | |
| 22 | M | 4 | n.a. | Compound | Well-circumscribed compound proliferation of | KIF5B- | + | + | + |
| | | | | Spitz nevus | large, spindled and epithelioid melanocytes with | RET | | | |
| | | | | | irregular epidermal hyperplasia. | | | | |
| 23 | F | 27 | Leg, | Pigmented | Symmetrical and well circumscribed compound | CEP89- | − | + | + |
| | | | lower right | Spindle Cell | proliferation of spindled and epithelioid, | BRAF | | | |
| | | | | Nevus | pigmented melanocytes with slight epidermal | | | | |
| | | | | | hyperplasia. Numerous melanophages in the | | | | |
| | | | | | papillary dermis. | | | | |
| 24 | F | 18 | Buttock, | Spitz nevus, | Predominantly intradermal proliferation of | LSM14A- | n.d. | + | + |
| | | | left | intradermal | spindled and epithelioid melanocytes with | BRAF | | | |
| | | | | | pleomorphic nuclei singly and in clusters | | | | |
| | | | | | between thickened collagen fibers. | | | | |
| 25 | M | 65 | Back, | Spitz nevus, | Predominantly intradermal proliferation of large | HRAS | n.d. | n.d. | n.d. |
| | | | left | desmoplastic | spindled and epithelioid melanocytes. | c.182A > T, | | | |
| | | | | | Pronounced desmoplastic stroma reaction. | p.Q61L | | | |
| 26 | M | 43 | retro- | Spitz nevus, | Symmetrical and well circumscribed | HRAS | n.d. | n.d. | n.d. |
| | | | auricular, | intradermal | predominantly intradermal proliferation of large | c.182A > T, | | | |
| | | | right | | spindled and epithelioid melanocytes with large | p.Q61L; | | | |
| | | | | | and pleomorphic nuclei. Desmoplastic stroma | ERBB4 | | | |
| | | | | | reaction. | c.1354G > A | | | |
| 27 | M | 25 | Chest | Spitz nevus, | Predominantly intradermal proliferation of | HRAS | n.d. | n.d. | n.d. |
| | | | | intradermal | spindled and epithelioid melanocytes with | c.182A > T, | | | |
| | | | | | pleomorphic nuclei with prominent nucleoli and | p.Q61L | | | |
| | | | | | abundant cytoplasm. Thickened collagen fibers. | | | | |
| 28 | M | 60 | Back, | Spitz nevus, | Hyperpigmented, epidermal hyperplasia. | HRAS | n.d. | n.d. | n.d. |
| | | | left | desmoplaslic | Pronounced desmoplastic stroma reaction with | c.182A > T, | | | |
| | | | | | epithelioid melanocytes and permeative | p.Q61L | | | |
| | | | | | lymphocytic infiltrate. | | | | |
| 29 | F | 44 | Shoulder, | Spitz nevus, | Symmetrical and superficial proliferation of | HRAS | n.d. | n.d. | n.d. |
| | | | right | desmoplastic | melanocytes with amphophilic cytoplasm and | c.182A > T, | | | |
| | | | | | vesicular nuclei with prominent nucleoli between | p.Q61L | | | |
| | | | | | thickened collagen fibers. | | | | |
| 30 | M | 7 | Cheek, | Atypical | Dome-shaped, symmetrical compound | HRAS | n.d. | n.d. | n.d. |
| | | | left | Spitz tumor | proliferation of spindled and epithelioid | c.182A > T, | | | |
| | | | | | melanocytes with pleomorphic nuclei. Irregular | p.Q61L | | | |
| | | | | | epidermal hyperplasia. | | | | |
| 31 | F | 18 | Leg, | Atypical | Polypoid compound proliferation of large | no mutation | n.d. | n.d. | n.d. |
| | | | upper left | Spitz tumor | epithelioid melanocytes with abundant cytoplasm | or fusion | | | |
| | | | | | and vesicular nuclei and numerous mitoses. | | | | |
| | | | | | Permeative lymphocytic infiltrate and marked | | | | |
| | | | | | irregular epidermal hyperplasia. | | | | |
| 32 | F | 24 | Buttock, | Pigmented | Symmetrical and well circumscribed compound | no mutation | n.d. | n.d. | n.d. |
| | | | right | Spindle Cell | proliferation of large epithelioid pigmented | or fusion | | | |
| | | | | Nevus | melanocytes with pleomorphic nuclei and | | | | |
| | | | | | vesicular chromatin and epidermal hyperplasia. | | | | |
| 33 | F | 39 | Leg, | Spitz nevus, | Well circumscribed and symmetrical melanocytic | no mutation | n.d. | n.d. | n.d. |
| | | | upper right | compound | lesion; at the epidermal-dermal junction and in | or fusion | | | |
| | | | | | the epidermis large nests composed of spindle- | | | | |
| | | | | | shaped melanocytes. | | | | |
| 34 | F | 15 | Leg, | Spitz nevus, | Exophytic compound proliferation of large | no mutation | n.d. | n.d. | n.d. |
| | | | lower right | compound | spindled and epithelioid melanocytes with | or fusion | | | |
| | | | | | pleomorphic, nuclei. Marked irregular epidermal | | | | |
| | | | | | hyperplasia and permeative lymphocytic | | | | |
| | | | | | infiltrate. | | | | |
| 35 | F | 32 | Arm, | Spitz nevus, | Symmetrical compound proliferation of spindled | no mutation | n.d. | n.d. | n.d. |
| | | | lower left | compound | and epithelioid melanocytes with epidermal | or fusion | | | |
| | | | | | hyperplasia; Kamino bodies. | | | | |
| 36 | F | 25 | Knee, | Spitz nevus, | Symmetrical and well circumscribed compound | no mutation | n.d. | n.d. | n.d. |
| | | | right | compound | proliferation of epithelioid melanocytes; | or fusion | | | |
| | | | | | epidermal hyperplasia and lymphocytic infiltrate. | | | | |
| 37 | F | 16 | Leg, | Spitz nevus, | Symmetrical compound proliferation of | no mutation | n.d. | n.d. | n.d. |
| | | | lower right | compound | pigmented spindled and epithelioid melanocytes | or fusion | | | |
| | | | | | with large nuclei. Irregular epidermal | | | | |
| | | | | | hyperplasia. | | | | |
| 38 | F | 32 | Leg, | Spitz nevus, | Well circumscribed and symmetrical junctional | no mutation | n.d. | n.d. | n.d. |
| | | | upper left | compound | proliferation of spindled and epithelioid | or fusion | | | |
| | | | | | melanocytes with irregular epidermal | | | | |
| | | | | | hyperplasia. Kamino bodies. | | | | |

TABLE 3
Clinical and histopathological characteristics of the analyzed Spitz tumors using FISH.

| # | Sex | Age | Localization | Diagnosis | FISH | IHC |
|---|---|---|---|---|---|---|
| 39 | M | 13 | Elbow, left | Spitz nevus, compound | FISH | + |
| 40 | F | 21 | Calf, right | Spitz nevus, compound | ROS1 | + |
| 41 | F | 31 | Upper arm, left | Spitz nevus, compound | PWWP2A-ROS1 | + |
| 42 | M | 6 | Knee, right | Spitz nevus, compound | PPFIBP1-ROS1 | + |
| | | | | pigmented | | |
| 43 | F | 30 | Foot, right | Spitz nevus, compound | ROS1 | + |
| | | | | pigmented | | |
| 44 | F | 39 | Back, left | Spitz nevus, compound | ROS1 | + |
| | | | | pigmented | | |
| 45 | F | 12 | Leg, right | Spitz nevus, desmoplastic | ROS1 | + |
| 46 | F | 29 | Arm, left | Spitz nevus, intraepidermal | ROS1 | + |
| 47 | F | 5 | Foot, right | Pigmented Spindle Cell Nevus | ROS1 | + |
| 48 | F | 55 | Gluteal, left | Atypical Spitz tumor | ROS1 | + |
| 49 | F | 29 | Thigh, right | Spitzoid melanoma | PWWP2A-ROS1 | + |
| 50 | F | 33 | Knee, right | Spitzoid melanoma | ROS1 | + |
| 51 | F | 59 | Leg, left | Spitzoid melanoma | ROS1 | + |
| 52 | F | 5 | Chin | Spitz nevus, compound | FMN1-ROS1 | + |
| 53 | F | 9 | Thigh, right lateral | Spitz nevus, compound | TPM3-ALK | + |
| 54 | M | 14 | Ear, right | Spitz nevus, compound | DCTN1-ALK | + |
| 55 | F | 28 | Back, right | Spitz nevus, compound | DCTN1-ALK | + |
| 56 | M | 35 | Leg, left | Spitz nevus, compound | DCTN1-ALK | + |
| 57 | M | 35 | Ear, left | Spitz nevus, compound | DCTN1-ALK | + |
| 58 | F | 17 | Ankle, left | Atypical Spitz tumor | TPM3-ALK | + |
| 59 | M | 17 | Leg, right lower | Spitzoid melanoma, 8 mm, | TPM3-ALK | + |
| | | | | ulcerated | | |
| 60 | F | 9 | Upper arm, right | Spitz nevus, compound | TPM3-ALK | + |
| 61 | F | 27 | Arm, upper left | Spitz nevus, compound | NTRK1 | + |
| 62 | F | 50 | Axilla, left | Spitz nevus, compound | NTRK1 | + |
| 63 | F | 5 | Buttock, right | Spitz tumor compound | NTRK1 | + |
| 64 | M | 2 | Hand, left | Spitz nevus, compound | NTRK1 | + |
| | | | | pigmented | | |
| 65 | F | 59 | Upper arm, right | Spitz nevus, compound | NTRK1 | + |
| | | | | pigmented | | |
| 66 | M | 18 | Leg, left | Atypical Spitz tumor | NTRK1 | + |
| 67 | F | 25 | Calf, left | Atypical Spitz tumor | NTRK1 | + |
| 68 | M | 28 | Back, right | Atypical Spitz tumor | LMNA-NTRK1 | + |
| 69 | M | 29 | Leg, right | Atypical Spitz tumor | NTRK1 | + |
| 70 | F | 18 | Trunk | Atypical Spitz tumor | NTRK1 | + |
| 71 | F | 21 | Arm, upper left | Atypical Spitz tumor | LMNA-NTRK1 | + |
| 72 | M | 21 | Calf, left | Atypical Spitz tumor | NTRK1 | + |
| 73 | M | 18 | Chest | Spitzoid melanoma, 9 mm | NTRK1 | + |
| 74 | M | 45 | Arm, left | Spitzoid melanoma, 1.2 mm | NTRK1 | + |
| 75 | F | 46 | Knee, right | Spitzoid melanoma, 2.3 mm | NTRK1 | + |
| 76 | F | 6 | Elbow, left | Spitzoid melanoma | NTRK1 | + |
| 77 | F | 39 | Knee, left | Spitzoid melanoma | NTRK1 | + |
| 78 | N | 73 | Shoulder, right | Spitzoid melanoma | NTRK1 | + |
| 79 | n.a. | n.a. | n.a. | Spitzoid melanoma | NTRK1 | + |
| 80 | M | 52 | Trunk | Atypical Spitz tumor | RET | + |
| 81 | F | 24 | Leg, right | Spitzoid melanoma, 0.75 mm | LMNA-RET | + |
| 82 | F | 15 | Forehead, right | Spitz nevus, compound | BRAF | + |
| 83 | F | 57 | Breast, right | Spitz nevus, desmoplastic | BRAF | + |
| 84 | F | 26 | Calf, right | Atypical Spitz tumor | BRAF | + |
| 85 | M | 32 | Chest, right | Atypical Spitz tumor | BRAF | + |
| 86 | F | 6 | Shoulder, right | Spitzoid melanoma, 5.4 mm | BRAF | + |
| 87 | M | 44 | Thigh, right | Spitz nevus, desmoplastic | BRAF | + |
| | | | | | amplification | |
| 88 | F | 11 | Periauricular, right | Atypical Spitz tumor | BRAF | + |
| | | | | | amplification | |
| 89 | F | 13 | Head | Atypical Spitz tumor | BAP1 loss | n.d. |
| 90 | F | 45 | Arm, upper right | Spitzoid melanoma | BAP1 loss | n.d. |
| 91 | F | 5 | Chin | Spitz nevus, compound | no fusion | n.d. |
| 92 | M | 14 | Thigh, right | Spitz tumor, compound | no fusion | n.d. |
| 93 | M | 15 | Knee, left | Spitz nevus, compound | no fusion | n.d. |
| 94 | M | 20 | Leg, right | Spitz nevus, compound | no fusion | n.d. |
| 95 | M | 22 | Shoulder, right | Spitz nevus, compound | no fusion | n.d. |
| 96 | F | 27 | Arm, upper right | Spitz nevus, compound | no fusion | n.d. |
| 97 | M | 28 | Neck | Spitz nevus, compound | no fusion | n.d. |
| 98 | F | 33 | Chest | Spitz nevus, compound | no fusion | n.d. |
| 99 | M | 38 | Back, right | Spitz nevus, compound | no fusion | n.d. |
| 100 | M | 46 | Breast, left | Spitz nevus, compound | no fusion | n.d. |
| 101 | F | 49 | Thigh, left | Spitz nevus, compound | no fusion | n.d. |
| 102 | M | 57 | Back, left | Spitz nevus, compound | no fusion | n.d. |
| 103 | F | 62 | Forearm, right | Spitz nevus, compound | no fusion | n.d. |
| 104 | F | 17 | Knee, left | Spitz nevus, compound | no fusion | n.d. |
| | | | | pigmented | | |
| 105 | F | 47 | Arm, right | Spitz nevus, desmoplastic | no fusion | n.d. |
| 106 | F | 19 | Leg, right | Spitz Nevus, intraepidermal | no fusion | n.d. |
| 107 | M | 51 | Hand, left dorsal | Spitz Nevus, intraepidermal | no fusion | n.d. |
| 108 | F | 7 | Leg, right | Pigmented Spindle Cell Nevus | no fusion | n.d. |
| 109 | M | 13 | Forehead, left | Pigmented Spindle Cell Nevus | no fusion | n.d. |
| 110 | F | 53 | Foot, left dorsal | Pigmented Spindle Cell Nevus | no fusion | n.d. |
| 111 | F | 59 | Back, left | Pigmented Spindle Cell Nevus | no fusion | n.d. |
| 112 | M | 8 | Ear, right | Atypical Spitz tumor | no fusion | n.d. |
| 113 | F | 12 | infraorbital, left | Atypical Spitz tumor | no fusion | n.d. |
| 114 | M | 12 | Thigh, left | Atypical Spitz tumor | no fusion | n.d. |
| 115 | M | 14 | Back, right | Atypical Spitz tumor | no fusion | n.d. |
| 116 | F | 18 | Gluteal, left | Atypical Spitz tumor | no fusion | n.d. |
| 117 | F | 22 | Knee, right | Atypical Spitz tumor | no fusion | n.d. |
| 118 | M | 31 | Calf, right | Atypical Spitz tumor | no fusion | n.d. |
| 119 | F | 32 | Breast, left | Atypical Spitz tumor | no fusion | n.d. |
| 120 | F | 38 | Thigh, left | Atypical Spitz tumor | no fusion | n.d. |
| 121 | M | 42 | Gluteal, right | Atypical Spitz tumor | no fusion | n.d. |
| 122 | F | 32 | Thigh, right | Spitzoid melanoma, 0.35 mm | no fusion | n.d. |
| 123 | F | 47 | Thigh, right | Spitzoid melanoma, 0.7 mm | no fusion | n.d. |
| 124 | F | 60 | Buttock, right | Spitzoid melanoma, 0.7 mm | no fusion | n.d. |
| 125 | M | 66 | Shoulder, left | Spitzoid melanoma, 0.8 mm | no fusion | n.d. |
| 126 | F | 72 | Knee, right | Spitzoid melanoma, 1.2 mm | no fusion | n.d. |
| 127 | M | 72 | Elbow, right | Spitzoid melanoma, 1.2 mm | no fusion | n.d. |
| 128 | F | 36 | Abdomen | Spitzoid melanoma, 3.3 mm | no fusion | n.d. |
| 129 | M | 4 | Arm, upper left | Spitzoid melanoma | no fusion | n.d. |
| 130 | F | 24 | Calf, right | Spitzoid melanoma | no fusion | n.d. |
| 131 | F | 27 | Thigh, left | Spitzoid melanoma | no fusion | n.d. |
| 132 | F | 33 | Arm, lower left | Spitzoid melanoma | no fusion | n.d. |
| 133 | M | 39 | Tight, left | Spitzoid melanoma | no fusion | n.d. |
| 134 | F | 40 | Arm, lower left | Spitzoid melanoma | no fusion | n.d. |
| 135 | F | 41 | Thigh, left | Spitzoid melanoma | no fusion | n.d. |
| 136 | M | 42 | Back, left | Spitzoid melanoma | no fusion | n.d. |
| 137 | M | 51 | Shoulder, left | Spitzoid melanoma | no fusion | n.d. |
| 138 | F | 64 | Thigh, right | Spitzoid melanoma | no fusion | n.d. |
| 139 | F | 65 | Arm, upper right | Spitzoid melanoma | no fusion | n.d. |
| 140 | F | 73 | Calf, left | Spitzoid melanoma | no fusion | n.d. |

TABLE 4
Genes sequenced across coding sequences.

| Gene | RefSeq | Gene | RefSeq | Gene | RefSeq | Gene | RefSeq |
|---|---|---|---|---|---|---|---|
| MTOR | NM_004958 | PIK3R1 | NM_181504 | SUFU | NM_016169 | ERBB2 | NM_001005862 |
| ARID1A | NM_006015 | APC | NM_001127511 | FGFR2 | NM_001144917 | RARA | NM_001145301 |
| MYCL1 | NM_005376 | PDGFRB | NM_002609 | HRAS | NM_005343 | STAT3 | NM_139276 |
| MPL | NM_005373 | NPM1 | NM_002520 | WT1 | NM_000378 | BRCA1 | NM_007298 |
| PTCH2 | NM_001166292 | FGFR4 | NM_022963 | MEN1 | NM_130801 | CD79B | NM_000626 |
| MUTYH | NM_001048171 | FLT4 | NM_002020 | CCND1 | NM_053056 | RPTOR | NM_020761 |
| CDKN2C | NM_001262 | FOXP4 | NM_001012426 | MRE11A | NM_005590 | CDH2 | NM_001792 |
| JUN | NM_002228 | CCND3 | NM_001136017 | GUCY1A2 | NM_000855 | SMAD2 | NM_001135937 |
| JAK1 | NM_002227 | PKHD1 | NM_138694 | ATM | NM_000051 | SMAD4 | NM_005359 |
| NRAS | NM_002524 | EPHA7 | NM_004440 | ETV6 | NM_001987 | CDH20 | NM_031891 |
| MCL1 | NM_001197320 | TNFAIP3 | NM_006290 | CBL | NM_005188 | BCL2 | NM_000633 |
| NTRK1 | NM_002529 | ESR1 | NM_001122742 | CHEK1 | NM_001274 | STK11 | NM_000455 |
| DDR2 | NM_006182 | IGF2R | NM_000876 | CCND2 | NM_001759 | DOT1L | NM_032482 |
| ABL2 | NM_007314 | CARD11 | NM_032415 | LRP6 | NM_002336 | GNA11 | NM_002067 |
| MDM4 | NM_002393 | HOXA3 | NM_153631 | KRAS | NM_033360 | MAP2K2 | NM_030662 |
| IKBKE | NM_014002 | INHBA | NM_002192 | ERBB3 | NM_001982 | INSR | NM_001079817 |
| AKT3 | NM_181690 | IKZF1 | NM_006060 | CDK4 | NM_000075 | SMARCA4 | NM_003072 |
| MYCN | NM_005378 | EGFR | NM_201284 | MDM2 | NM_002392 | JAK3 | NM_000215 |
| DNMT3A | NM_175629 | CDK6 | NM_001259 | PTPN11 | NM_002834 | CCNE1 | NM_001238 |
| ALK | NM_004304 | EPHB4 | NM_004444 | CDK8 | NM_001260 | CEBPA | NM_004364 |
| MSH2 | NM_000251 | PIK3CG | NM_002649 | FLT3 | NM_004119 | AKT2 | NM_001626 |
| MSH6 | NM_000179 | MET | NM_001127500 | FLT1 | NM_001160030 | CD79A | NM_001783 |
| LRP1B | NM_018557 | SMO | NM_005631 | BRCA2 | NM_000059 | ERCC2 | NM_000400 |
| IDH1 | NM_005896 | BRAF | NM_004333 | RB1 | NM_000321 | BCL2L1 | NM_138578 |
| ERBB4 | NM_005235 | EPHB6 | NM_004445 | 1RS2 | NM_003749 | SRC | NM_198291 |
| VHL | NM_000551 | EZH2 | NM_001203249 | BCL2L2 | NM_004050 | TOP1 | NM_003286 |
| RAF1 | NM_002880 | TNKS | NM_003747 | NKX2-1 | NM_001079668 | PLCG1 | NM_182811 |
| TGFBR2 | NM_003242 | GPR124 | NM_032777 | HSP90AA1 | NM_001017963 | AURKA | NM_198436 |
| MLH1 | NM_001167617 | FGFR1 | NM_001174065 | AKT1 | NM_001014431 | GNAS | NM_000516 |
| CTNNB1 | NM_001904 | PRKDC | NM_006904 | LTK | NM_206961 | ARFRP1 | NM_003224 |
| BAP1 | NM_004656 | MYC | NM_002467 | MAP2K1 | NM_002755 | RUNX1 | NM_001754 |
| MITF | NM_006722 | JAK2 | NM_004972 | SMAD3 | NM_005902 | ERG | NM_182918 |
| EPHA3 | NM_182644 | PTPRD | NM_130393 | BCL2A1 | NM_004049 | CRKL | NM_005207 |
| EPHA6 | NM_001080448 | CDKN2A | NM_001195132 | NTRK3 | NM_002530 | SMARCB1 | NM_003073 |
| EPHB1 | NM_004441 | CDKN2B | NM_004936 | IDH2 | NM_002168 | CHEK2 | NM_007194 |
| ATR | NM_001184 | PAX5 | NM_016734 | IGF1R | NM_000875 | NF2 | NM_181830 |
| PIK3CA | NM_006218 | GNAQ | NM_002072 | TSC2 | NM_001114382 | SOX10 | NM_006941 |
| SOX2 | NM_003106 | NTRK2 | NM_001018065 | CDH5 | NM_001795 | CRLF2 | NM_022148 |
| BCL6 | NM_001130845 | PTCH1 | NM_001083602 | CDH1 | NM_004360 | USP9X | NM_001039591 |
| FGFR3 | NM_022965 | ABL1 | NM_007313 | PHLPP2 | NM_015020 | KDM6A | NM_021140 |
| PDGFRA | NM_006206 | TSC1 | NM_001162427 | FANCA | NM_001018112 | ARAF | NM_001654 |
| KIT | NM_000222 | NOTCH1 | NM_017617 | TP53 | NM_001126114 | GATA1 | NM_002049 |
| KDR | NM_002253 | RET | NM_020630 | AURKB | NM_004217 | AR | NM_000044 |
| EPHA5 | NM_182472 | PTEN | NM_000314 | MAP2K4 | NM_003010 | TBX22 | NM_001109879 |
| TET2 | NM_001127208 | TNKS2 | NM_025235 | NF1 | NM_001042492 | PAK3 | NM_001128166 |
| FBXW7 | NM_033632 | RICTOR | NM_152756 | | | | |

TABLE 5
Introns included in hybridization selection assay.

| Gene | RefSeq | Intron |
|---|---|---|
| ALK | NM_004304 | 19 |
| RAF1 | NM_002880 | 5, 6, 7, 8, 9 |
| ETV5 | NM_004454 | 6, 7 |
| ETV1 | NM_001163151 | 3, 4 |
| EGFR | NM_201284 | 7 |
| BRAF | NM_004333 | 7, 8, 9, 10 |
| RET | NM_020630 | 9, 10, 11 |
| MLL | NM_005933 | 6, 7, 8, 9 |
| ETV6 | NM_001987 | 5, 6 |
| RARA | NM_001145301 | 2 |
| ETV4 | NM_001986 | 8 |
| TMPRSS2 | NM_005656 | 1, 2 |
| BCR | NM_004327 | 8, 13, 14 |
| EWSR1 | NM_013986 | 8, 9, 10, 11, 12, 13 |

TABLE 6
DNA sequencing statistics of 38 Spitz tumors.

| | | | | | | | | | | | |
|---|---|---|---|---|---|---|---|---|---|---|---|
| 1 | 43680902 | 99% | 0.42% | 0.66% | 51% | 15752607 | 188.91 | 0.82 | 1739.23 | 1212.99 | 1229 |
| 2 | 50758746 | 99% | 0.44% | 0.99% | 55% | 15942918 | 219.69 | 0.82 | 1636.51 | 1160.77 | 1178 |
| 3 | 48223361 | 99% | 0.44% | 0.54% | 86% | 4243484 | 174.85 | 0.84 | 1832.31 | 311.41 | 313 |
| 4 | 40855682 | 99% | 0.77% | 1.00% | 69% | 8641727 | 155.11 | 0.83 | 1883.42 | 700.47 | 716 |
| 5 | 49462206 | 99% | 0.68% | 1.01% | 59% | 13834857 | 186.85 | 0.83 | 1749.94 | 1058.57 | 1091 |
| 6 | 43492838 | 99% | 0.47% | 4.93% | 51% | 14443853 | 209.26 | 0.81 | 1663.85 | 1110.38 | 1088 |
| 7 | 42021747 | 99% | 0.44% | 1.34% | 51% | 14749854 | 202.86 | 0.83 | 1700.59 | 1121.88 | 1140 |
| 8 | 59626809 | 99% | 0.44% | 0.87% | 72% | 11491721 | 179.22 | 0.83 | 1786.83 | 868.61 | 900 |
| 9 | 44204047 | 99% | 0.55% | 3.17% | 55% | 13303731 | 193.44 | 0.81 | 1686.69 | 1013.32 | 1027 |
| 10 | 45574775 | 99% | 0.79% | 2.08% | 67% | 10253882 | 168.27 | 0.82 | 1814.29 | 813.2 | 831 |
| 11 | 15794873 | 99% | 0.36% | 0.44% | 21% | 8748665 | 160.73 | 0.83 | 1062.87 | 419.38 | 421 |
| 12 | 53716254 | 99% | 0.67% | 0.99% | 60% | 14718057 | 193.33 | 0.82 | 1712.72 | 1111.34 | 1134 |
| 13 | 39127695 | 99% | 0.77% | 1.90% | 50% | 13874632 | 183.07 | 0.82 | 1751.05 | 1095.29 | 1107 |
| 14 | 17206961 | 99% | 0.38% | 0.32% | 18% | 10433011 | 135.22 | 0.84 | 1140.84 | 532.05 | 544 |
| 15 | 18250776 | 99% | 0.38% | 0.33% | 17% | 10308621 | 144.82 | 0.8 | 1055.13 | 505.6 | 523 |
| 16 | 50629468 | 99% | 0.77% | 1.20% | 60% | 15219911 | 184.62 | 0.82 | 1743.42 | 1172.02 | 1195 |
| 17 | 49297848 | 92% | 0.58% | 2.85% | 53% | 16339804 | 191.39 | 0.82 | 1715.55 | 1268.24 | 1282 |
| 18 | 50497275 | 99% | 0.45% | 1.15% | 52% | 17125750 | 211.09 | 0.82 | 1662.58 | 1278.6 | 1303 |
| 19 | 52694441 | 92% | 0.57% | 2.45% | 51% | 18596366 | 190.34 | 0.83 | 1744.64 | 1462.92 | 1410 |
| 20 | 15232277 | 99% | 0.35% | 0.40% | 16% | 9270394 | 142.57 | 0.83 | 1108.45 | 465.12 | 470 |
| 21 | 69262651 | 99% | 0.68% | 0.51% | 81% | 8387727 | 164.58 | 0.84 | 1858.97 | 641.67 | 645 |
| 22 | 43007418 | 99% | 0.44% | 0.75% | 53% | 14342180 | 217.48 | 0.82 | 1632.36 | 1050.59 | 1067 |
| 23 | 56144067 | 99% | 0.78% | 1.46% | 67% | 12830210 | 169.64 | 0.83 | 1826.82 | 1020.46 | 1049 |
| 24 | 17637624 | 99% | 0.38% | 0.39% | 13% | 11095731 | 145.73 | 0.83 | 1103.36 | 561.21 | 565 |
| 25 | 17564962 | 99% | 0.37% | 0.38% | 16% | 10731098 | 137.25 | 0.83 | 1120.34 | 540.74 | 558 |
| 26 | 15227480 | 99% | 0.34% | 0.35% | 19% | 8960940 | 138.51 | 0.84 | 1124.25 | 441.06 | 457 |
| 27 | 18736706 | 99% | 0.37% | 0.45% | 22% | 10526919 | 132 | 0.83 | 1134.18 | 544.3 | 563 |
| 28 | 15656437 | 99% | 0.34% | 0.37% | 21% | 8844369 | 147.38 | 0.83 | 1096.61 | 429.15 | 445 |
| 29 | 17603229 | 99% | 0.35% | 0.32% | 23% | 9932176 | 138.01 | 0.84 | 1137.51 | 498.44 | 509 |
| 30 | 43078914 | 99% | 0.67% | 1.11% | 52% | 14286316 | 193.95 | 0.82 | 1696.45 | 1083.13 | 1097 |
| 31 | 34473544 | 99% | 0.47% | 3.05% | 67% | 8027432 | 150.9 | 0.82 | 1881.74 | 665.35 | 684 |
| 32 | 57040666 | 99% | 0.68% | 1.18% | 64% | 14054691 | 194 | 0.83 | 1725.66 | 1054.59 | 1081 |
| 33 | 53273598 | 99% | 0.69% | 1.59% | 65% | 12594967 | 163.05 | 0.83 | 1847.34 | 1010.5 | 1039 |
| 34 | 48792099 | 99% | 0.52% | 1.49% | 67% | 11330130 | 172.29 | 0.83 | 1811.07 | 890.55 | 915 |
| 35 | 56907738 | 99% | 0.69% | 1.45% | 58% | 16086659 | 215.45 | 0.81 | 1620.41 | 1164.01 | 1187 |
| 36 | 38757620 | 99% | 0.52% | 1.50% | 63% | 9936474 | 201.67 | 0.82 | 1696.5 | 740.84 | 757 |
| 37 | 49441431 | 99% | 0.80% | 1.47% | 74% | 8535510 | 160.81 | 0.83 | 1862.15 | 676.26 | 692 |
| 38 | 38597652 | 99% | 0.78% | 1.43% | 64% | 9526024 | 186.63 | 0.83 | 1766.35 | 734.23 | 752 |

TABLE 7
RNA sequencing statistics of 38 Spitz tumors.

| | | | | | | | | | |
|---|---|---|---|---|---|---|---|---|---|
| 1 | 52393754 | 86% | 0.67% | 3.44% | 69% | 97% | 51% | 5% | 267.73 |
| 2 | 42796746 | 87% | 0.63% | 4.17% | 63% | 97% | 52% | 5% | 259.49 |
| 3 | 122134074 | 86% | 0.73% | 2.47% | 90% | 97% | 49% | 5% | 199.9 |
| 4 | 46284520 | 85% | 0.89% | 2.50% | 76% | 97% | 46% | 7% | 168.96 |
| 5 | 50854826 | 85% | 0.94% | 3.45% | 70% | 97% | 50% | 6% | 243.83 |
| 6 | 66498690 | 88% | 0.69% | 2.76% | 68% | 97% | 53% | 5% | 363.71 |
| 7 | 52843870 | 87% | 0.66% | 3.47% | 72% | 97% | 50% | 5% | 240.26 |
| 8 | 50361907 | 86% | 0.77% | 3.15% | 72% | 97% | 48% | 6% | 224.35 |
| 9 | 57350489 | 85% | 0.73% | 3.00% | 69% | 96% | 52% | 4% | 304.8 |
| 10 | 61391661 | 86% | 0.77% | 3.20% | 76% | 97% | 49% | 5% | 243.61 |
| 11 | 46415279 | 77% | 0.46% | 2.84% | 73% | 98% | 47% | 2% | 655.67 |
| 12 | 61195040 | 86% | 0.94% | 3.31% | 68% | 97% | 50% | 4% | 320.23 |
| 13 | 49592222 | 86% | 0.73% | 2.79% | 71% | 97% | 49% | 7% | 246.93 |
| 14 | 39324605 | 82% | 0.50% | 2.69% | 63% | 98% | 46% | 2% | 511.44 |
| 15 | 52044254 | 82% | 0.37% | 2.29% | 72% | 98% | 47% | 2% | 722.76 |
| 16 | 56239578 | 86% | 0.95% | 3.72% | 68% | 96% | 51% | 5% | 300.2 |
| 17 | 57483583 | 87% | 0.70% | 2.40% | 74% | 97% | 49% | 9% | 242.05 |
| 18 | 54430378 | 87% | 0.65% | 2.75% | 69% | 97% | 50% | 5% | 267.22 |
| 19 | 62390150 | 87% | 0.73% | 3.27% | 70% | 97% | 48% | 7% | 304.07 |
| 20 | 45879456 | 79% | 0.47% | 2.57% | 74% | 98% | 45% | 2% | 631.49 |
| 21 | 53435566 | 85% | 1.06% | 2.76% | 77% | 97% | 47% | 5% | 189.36 |
| 22 | 48326968 | 87% | 0.65% | 3.20% | 70% | 97% | 49% | 5% | 227.8 |
| 23 | 43739879 | 86% | 0.82% | 3.64% | 73% | 97% | 51% | 6% | 195.2 |
| 24 | 40299110 | 82% | 0.45% | 2.32% | 66% | 98% | 50% | 2% | 489.09 |
| 25 | 52181406 | 81% | 0.45% | 1.37% | 81% | 98% | 48% | 1% | 638.24 |
| 26 | 38472733 | 80% | 0.45% | 2.19% | 64% | 98% | 48% | 2% | 490.99 |
| 27 | 36232684 | 80% | 0.55% | 2.15% | 66% | 98% | 51% | 2% | 422.81 |
| 28 | 50973629 | 78% | 0.43% | 1.83% | 76% | 98% | 47% | 1% | 677.15 |
| 29 | 44136276 | 79% | 0.50% | 1.84% | 80% | 98% | 45% | 2% | 614.67 |
| 30 | 50107832 | 88% | 0.88% | 3.29% | 64% | 96% | 51% | 5% | 308.49 |
| 31 | 85185779 | 83% | 0.96% | 2.74% | 82% | 97% | 45% | 5% | 231.76 |
| 32 | 60880957 | 86% | 0.94% | 2.86% | 74% | 97% | 49% | 5% | 255.47 |
| 33 | 50453581 | 84% | 1.13% | 3.09% | 72% | 97% | 46% | 5% | 211.36 |
| 34 | 54579307 | 83% | 0.77% | 3.08% | 77% | 96% | 49% | 7% | 201.21 |
| 35 | 51997530 | 87% | 0.89% | 3.69% | 63% | 97% | 51% | 5% | 312.72 |
| 36 | 56688409 | 86% | 0.70% | 3.05% | 75% | 97% | 52% | 5% | 239.64 |
| 37 | 41991585 | 84% | 0.82% | 3.30% | 68% | 97% | 51% | 6% | 221.39 |
| 38 | 42850478 | 85% | 0.74% | 2.87% | 70% | 97% | 49% | 6% | 210.31 |

TABLE 8
Primers used for RT-PCR.

| | Forward | Reverse |
|---|---|---|
| Fusion | Primer | Primer |
| CLIP1-ROS1 | 5′-GCAGGGACG | 5′-ATCTCCTCT |
| | AAGTCACAAGT | TGGGTTGGA |
| PPFIBP1-ROS1 | 5′-TGGTTTGCA | 5′-AGCACTGTC |
| | AGATGAAAGGA | ACCCCTTCC |
| TPM3-ROS1 | 5′-CCTGCAAAA | 5′-GGGAAGGCA |
| | GCTGGAAGAAG | GGAAGATTT |
| ZCCHC8-ROS1 | 5′-ACGAGGAGG | 5′-ATCTCCTCT |
| | ACGAAAATGG | TGGGTTGGA |
| MYO5A-ROS1 | 5′-GCAAGAAAA | 5′-AGCACTGTC |
| | AGAAGCCCTCA | ACCCCTTCC |
| PWWP2A-ROS1 | 5′-CTTCTCCGG | 5′-GCAAGAGAC |
| | GGTCCTCAT | GCAGAGTCA |
| HLA-A-ROS1 | 5′-GTGACAGTG | 5′-AAAGGTCAG |
| | CCCAGGGCTCTG | TGGGATTGT |
| ERC1-ROS1 | 5′-TGAAGGAGG | 5′-ATCTCCTCT |
| | TGGAAAATGAGA | TGGGTTGGA |
| DCTN1-ALK | 5′-CCTCCTTCA | 5′-GAGCTTGCT |
| | GGCATTGCTAC | CAGCTTGTA |
| TPM3-ALK | 5′-AGCCAAGCT | 5′-GCTTGCTCA |
| | GGAAAAGACAA | GCTTGTACTCA |
| GOLGA5-RET | 5′-AGAAGCTGA | 5′-CAAATTCGC |
| | TGGGCCAGATA | CTTCTCCTA |
| KIF5B-RET | 5′-TTAGCAGCA | 5′-CAAATTCGC |
| | TGTCAGCTTCG | CTTCTCCTA |
| TP53-NTRK1 | 5′-CCAGCCAAA | 5′-AGACCCCAA |
| | GAAGAAACCAC | AAGGTGTT |
| LMNA-NTRK1 | 5′-GAGGGCGAG | 5′-AGGAGCAGC |
| | CTGCATGAT | GTAGAAAGG |
| CEP89-BRAF | 5′-TAATGGCAG | 5′-CTCCATCAC |
| | AGTGCCTCAAA | CACGAAATCCT |

### Example 2

### Functional Studies of ROS1, ALK, NTRK1, RET and BRAF Fusions

[1325] After sequencing data revealed various kinase fusion products in FIGS. 1A, 1B and 1C, validation studies as well as functional studies were performed to investigate the role of these kinase fusions both in vitro and in vivo.

[1326] To validate sequencing data, interphase fluorescence in situ hybridization (FISH) was performed. A commercially available break-apart probe was used for ALK according to the manufacturer's protocol (Abbott, Des Plaines, Ill.). For ROS1, RET, NTRK1, and BRAF, break-apart fluorescence in situ hybridization (FISH) probes were prepared from BAC clones using standard procedures and labeled by nick translation with SpectrumGreen-dUTP and SpectrumnRed-dUTP (Abbott, Des Plaines, Ill.). The following flanking BAC clones were used: RET (red: RP11-379D20, RP11-124011; green: RP11-718J13, RP11-54P13), NTRK1 (red: RP11-284F21, RP11-66D17; green: RP11-1038N13, RP11-1059C21), ROS1 (red: RP11-379F24, RP11-103F10; green: RP11-1059G13, RP11-721K11), and BRAF (red: RP11-715H9, RP11-133N19; green: RP11-759K14, RP11-78806). The probes were hybridized on 5 μm-thick tissue sections, and the number and localization of the hybridization signals was assessed in a minimum of 100 interphase nuclei with well-delineated contours and at least 50% of neoplastic cells had to show a split signal to report a rearrangement of a kinase.

[1327] Immunohistochemical analysis (IHC) was performed on archival FFPE tumor specimens to confirm the expression of the fusion kinases and the activation of oncogenic pathways. A Discovery Ultra instrument with a multimer/DAB detection system (Ventana Medical Systems, Inc., Tucson, Ariz.) was used with appropriate negative and positive controls the following antibodies: ALK (clone D5F3; Cell Signaling, Danvers, Mass.; Dilution: 1:250), ROS1 (clone D4D6; Cell Signaling, Danvers, Mass.; Dilution: 1:25). NTRK1 (clone EP 058Y; Epitomics, Burlingame, Calif.; Dilution: 1:100), RET (clone EPR287; Epitomics, Burlingame, Calif.; Dilution: 1:250). The percentage of tumor cells exhibiting staining was scored by at least two independent pathologists.

[1328] The functional roles and the activation of oncogenic signaling pathways, were cloned PWWP2A-ROS1, DCTN1-ALK, LMNA-NTRK1, and GOLGA5-RET fusions and expressed them in melan-a cells (immortalized, non-tumorigenic mouse melanocytes). Expression vectors with green-fluorescent-protein (GFP) and the full-length, wild-type kinases ROS1, ALK, NTRK1, and RET were used as controls. Plasmids containing cDNAs of the genes of interest were obtained (Table 9) and their sequences were verified (Scaffidi & Misteli, Nat Cell Biol 10, 452-9 (2008); Johannessen, C. M. et al. Nature 468, 968-72 (2010); Yano, H. et al. J Neurosci Res 59, 356-64 (2000)). Non-synonymous mutations deviating from the RefSeq sequence found in the NTRK1 and RET plasmids were corrected using QuikChange site-directed mutagenesis (Agilent Technologies). Fusion constructs were generated by overlap extension. (Heckman, K. L. & Pease, L. R. Nat Protoc 2, 924-32 (2007)). Once PCR products containing the target cDNAs were generated, they were cloned into a pENTR vector using the pENTRD-TOPO cloning kit (Life Technologies). All constructs were subsequently cloned into the pLenti6.3/TO/V5-Dest backbone (Life Technologies) and checked by digestion and sequencing. The larger fusion genes involving ALK and ROS1 were also cloned into the PBX2.1 backbone of the PiggyBac Transposon system. (Choi, H. J. et al. PLoS One 8, e56949 (2013))

[1329] Melan-a cells were a gift; they were maintained in glutamine-containing RPMI-1640 supplemented with 10% heat-inactivated fetal bovine serum, 200 nM of 12-O-tetradecanoylphorbol-13-acetate (TPA), penicillin (100 units/mL) and streptomycin (50 mg/mL). 293FT cells were purchased from Life Technologies and maintained in DME-H21 medium containing 10% heat inactivated fetal bovine serum, MEM Non-Essential Amino Acids (0.1 mM), sodium pyruvate (1 mM), penicillin (100 units/mL) and streptomycin (50 mg/mL).

[1330] Lentiviruses were produced by transfecting 293FT cells with plasmid DNA in a pLenti6.3/TO/V5-Dest backbone together with ViraPower™ (Life Technologies) according to the manufacturer's protocol. Infections of melan-a cells were conducted in the presence of 10 μg/ml of Polybrene (Santa Cruz Biotechnology). Stably transduced melan-a cells expressing GOLGA5-RET, LMNA-NTRK1, PWWP2A-ROS1, RET, and NTRK1 were generated by infection with the respective lentivirus. ALK and ROS1 expressing melan-a cell lines were generated by cotransfection of the PBX2.1 construct together with pCMV-HyPBase transposase vector. Melan-a cell lines stably expressing GFP were generated using pLenti6.2/V5 and PBX2.1 vectors and used as a control. Cells were selected for at least 20 days using 5 μg/ml of blasticidin S-hydrochloride (Life Technologies) after transduction.

[1331] Anti-RET (#3220), anti-phospho-RET (Tyr905) (#3221), anti-ALK (#3791), anti-phospho-ALK (Tyr1096) (#6962), anti-ROS1 (#3266), anti-phospho ROS1 (Tyr2274) (#3078), anti-phospho-p44/42 MAPK (Erk1/2) (Thr202/Tyr204) (#9101), anti-AKT (#9272), anti-phospho-AKT (Ser473) (#9271), anti-S6 Ribosomal Protein (#2317), anti-phospho-S6 Ribosomal Protein (Ser235/236) (#2211), anti-p-PLCγ1 (#2822), anti-phospho-PLCγ1 (Tyr783) (#2821), anti-SHP2 (D50F2) (#3397), anti-phospho-SHP2 (Tyr 542) (#3751), as well as the secondary antibodies anti-rabbit IgG-HRP (#7076) and anti-mouse IgG-HRP (#7074) were purchased from Cell Signaling Technology (Danvers, Mass.). Anti-HSP60 (sc-1722) and anti-ERK2 (C-14) (sc-154) as well as the secondary antibodies anti-goat IgG-HRP (sc-2033) were purchased from Santa Cruz Biotechnology (Santa Cruz, Calif.). Anti-TrkA (ab37837) and anti-phospho-TrkA (Tyr408) (ab1445) were purchased from Abcam (Cambridge, Mass.).

[1332] Cell lysates were prepared in RIPA buffer supplemented with Halt protease and phosphatase inhibitor cocktail (Thermo Scientific). Equal amounts of protein, as measured by BCA protein assay, were resolved in 4-12% Bis-Tris NuPage gradient gels (Life Technologies) and transferred electrophoretically onto a PVDF 0.45-micron membrane. Membranes were blocked for 1 hour at room temperature in 5% BSA or non-fat milk in TBST before being incubated overnight at 4° C. with the primary antibodies. All primary antibodies were diluted 1:1000 in 5% BSA or non-fat milk in TBST. After 3 washes of 5 minutes in TBST, secondary antibodies were diluted 1:3000 in 5% non-fat milk in TBST and incubated for 1 hour at room temperature. After another 3 washes in TBST, detection of the signal was achieved by incubating the membrane on an ECL solution from Millipore and exposure on autoradiography films from Denville Scientific (Metuchen, N. J.). Vandetanib and cabozantinib were purchased from Selleckchem (Houston, Tex.). Crizotinib was purchased from Chemie Tek (Indianapolis, Ind.). AZ-23 was purchased from Axon Medchem (Groningen, The Netherlands).

[1333] ROS1 Fusions:

[1334] ROS1 rearrangements were found in 19 of 75 (25%) Spitz nevi, 2 of 32 (6%) atypical Spitz tumors, and 3 of 33 (9%) spitzoid melanoma (FIG. 3a). The ROS1 rearrangements fused the intact tyrosine kinase coding sequence of ROS1 to the 5′ portion of nine different partners (FIG. 3a). The expression of the chimeric ROS1 protein by immunohistochemistry was observed exclusively in cases with ROS1 rearrangements (FIGS. 3b and 3c). Expression of the PWWP2A-ROS1 fusion construct in melan-a cells showed increased phosphorylation of the fusion protein, suggesting that the chimeric protein is constitutively active. Consistent with this, the MAPK and PI3K pathways were strongly activated compared to the GFP and the wild-type, full-length ROS1 controls. The phosphorylation of PWWP2A-ROS1, AKT, S6 and SHP2, but not ERK, was at least partially inhibited by crizotinib, an FDA-approved drug for lung cancer with ALK translocations that acts as an ALK (Kwak, E. L. et al. N Engl J Med 363, 1693-703 (2010)) and ROS1 (Bergethon, K. et al. J Clin Oncol 30, 863-70 (2012)) inhibitor (FIG. 3d).

[1335] ALK Fusions:

[1336] ALK fusions in 8 of 75 (10.7%) Spitz nevi, 5 of 32 (15.6%) atypical Spitz tumors, and 1 of 33 (3%) spitzoid melanoma (FIG. 4a). Expression of the chimeric ALK protein was confirmed by immunohistochemistry and the rearrangements were validated in all cases with ALK fusions with FISH (FIGS. 4h and 4c). Cases without ALK rearrangements by sequencing did not show ALK expression in immunohistochemistry or separated signals by FISH. TPM3 and DCTN1 were 5′ fusion partners for ALK rearrangements (FIG. 2b). TPM3-ALK fusions were detected in 8 spitzoid neoplasms. DCTN1 represents a novel fusion partner of ALK; it was found in 6 cases, and resulted from a balanced translocation between homologous copies of chromosome 2 (FIG. 4d). Expression of the DCTN1-ALK fusion construct in melan-a cells showed increased phosphorylation of the fusion protein compared to the wild-type, full-length ALK, suggesting that the chimeric protein is constitutively active. Similar to the ROS1 fusions, AKT, ERK, and S6 were more phosphorylated in melan-a cells with the ALK fusion construct compared to the GFP control. Crizotinib inhibited the ALK fusion-induced activation of the oncogenic PI3K and MAPK signaling pathways (FIG. 4e).

[1337] NTRK1 Fusions:

[1338] NTRK1 rearrangements were detected in 8 of 75 (10.7%) Spitz nevi, 8 of 32 (25%) atypical Spitz tumors, and 7 of 33 (21.2%) spitzoid melanoma (FIG. 5a). The expression of NTRK1 was confirmed with immunohistochemistry in cases with NTRK1 fusions (FIG. 5b), but was absent in cases without NTRK1 rearrangements. The LMNA-NTRK1 fusions involved the novel fusion partner LMNA (localized at 1q22), and were caused by a 743 kb deletion of chromosome 1 q, joining the first two exons of LMNA with NTRK1 starting at exon 11 (FIG. 5c). The interchromosomal TP53-NTRK1 translocation resulted from a fusion joining NTRK1 starting from exon 9, containing the tyrosine kinase domain, to the 3′UTR of TP53 (FIG. 2B). The expression of the LMNA-NTRK1 fusion construct in melan-a cells showed increased levels of phosphorylation of the fusion protein, AKT, ERK, S6 and PLCγ1 compared to the control cells. The strong activation of MAPK, PLCγ1 and PI3K pathways was inhibited by the NTRK1 inhibitor AZ-23 (FIG. 5d).

[1339] RET Fusion:

[1340] RET fusions in 2 of 75 (2.7%) Spitz nevi, 1 of 32 (3.1%) atypical Spitz tumors, and 1 of 33 (3%) spitzoid melanoma (FIG. 6a). Fusions of RET on chromosome 10q11 involved the 5′ fusion partners KIF5B on chromosome 10p11 and GOLGA45 on chromosome 14q32 (FIG. 2b). In both fusions, the RET tyrosine kinase domain was fused to the coiled-coil domains of KIF5B (exons 1-16) or GOLGA5 (exons 1-7). Immunohistochemical expression of RET was observed only in cases with RET translocations (FIG. 6b). Expression of the GOLGA5-RET fusion construct in melan-a cells showed increased phosphorylation of the fusion protein, AKT, ERK, S6, and PLCγ-1 compared to control cells. The phosphorylation of these proteins could be suppressed by vandetanib (FIG. 6c) or cabozantinib (FIG. 6d), which are both small molecule RET inhibitors that are FDA approved for medullary thyroid cancer.

[1341] BRAF Fusions:

[1342] Gene rearrangements of the serine/threonine kinase BRAF were found in 4 of 75 (5.3%) Spitz nevi, 2 of 32 (6.3%) atypical Spitz tumors, and 1 of 33 (3%) spitzoid melanoma. The fusion genes contained CEP89 exons 1-16 followed by the kinase domain of BRAF encoded by exons 9-18, or LSM14A exons 1-9 followed by BRAF exons 9-18, both resulting in loss of the auto-inhibitory, N-terminal RAS-binding domain of BRAF (FIG. 2b). In addition to the identified translocations, 1 of 75 (1.3%) Spitz nevi and 1 of 32 (3.1%) atypical Spitz tumors showed BRAF amplification as determined by at least 8 BRAF fusion signals per nucleus in interphase FISH.

[1343] These findings of the activated effector pathways downstream of the fusion kinases are in line with other experimental systems of cancer. For example, ubiquitous expression of constitutively active RFP-RET fusions in mice results in generalized melanocyte proliferation, formation of nevi and ultimately melanomas with MAPK pathway activation; this is similar to the finding of GOLGA5-RET fusions in spitzoid neoplasms (Kato, M. et al. Oncogene 17, 1885-8 (1998)). Autocrine neurotrophin signaling involving NTRK1 has been shown to promote proliferation and migration in melanoma cell lines (Truzzi, F. et al. J Invest Dermatol 128, 2031-40 (2008)), and constitutively active NTRK1 activates MAPK and PI3K pathways in NIH-3T3 cells (Reuther, G. W. et al. Mol Cell Biol 20, 8655-66 (2000)). Phosphorylation of the MAPK and PI3K pathways is an essential component of oncogenic ALK signaling in lymphoma (Lamant, L., et al., Blood 93, 3088-95 (1999)) and lung cancer (Soda, M. et al. Nature 448, 561-6 (2007)). The novel fusion DCTN1-ALK has similar effects. The activation of the MAPK and PI3K pathways by the novel PWWP2A-ROS1 fusion is also similar to the changes associated with other oncogenic ROS1 fusions in various cancer types (Bergethon, K. et al. J Clin Oncol 30, 863-70 (2012); Jun, H. J. et al. Cancer Res 72, 3764-74 (2012)). The results of the present functional validation experiments in xenograft models are consistent with previous studies which showed that TPM3-ROS1 (Takeuchi, K. et al. Nat Med 18, 378-81 (2012)), EML4-ALK (Soda, M. et al. Nature 448, 561-6 (2007)), KIF5B-RET (Lipson. D. et al. Nat Med 18, 382-4 (2012); Takeuchi. K. et al. Nat Med 18, 378-81 (2012); Kohno, T. et al. Nat Med 18, 375-7 (2012)) fusions drive tumor formation in non-small cell lung cancers.

[1344] The common occurrence of kinase fusions in the entire biologic spectrum of spitzoid neoplasms (benign Spitz nevi, atypical Spitz tumors, spitzoid melanomas) suggests that these fusions occur early in the pathogenesis of spitzoid neoplasms. Therefore, kinase fusions are necessary, but not sufficient for malignant transformation, a situation analogous to that of mutations in oncogenes (such as BRAF, NRAS, GNAQ and GNA11) commonly found in melanocytic neoplasms. Consequently, the frequent kinase fusions described herein are unlikely to be useful in distinguishing benign from malignant spitzoid neoplasms.

[1345] Although the majority of spitzoid neoplasms behave in an indolent fashion, some spitzoid neoplasms metastasize and require systemic therapy. Lung cancers, lymphomas, and sarcomas with ALK or ROS1 fusions, and thyroid cancers with RET fusions can be successfully treated using US Food and Drug Administration (FDA)-approved kinase inhibitors such as crizotinib, cabozantinib, and vandetanib. The fusion kinases identified here are therefore potential therapeutic targets for translocation-positive melanocytic tumors that require systemic therapy.

TABLE 9
Plasmids used for the fusion constructs

| | | |
|---|---|---|
| LaminA | NM_170707.2 | pBABE-puro-GFP-wt-lamin A |
| | | (Addgene plasmid 17662) |
| NTRK1 | NM_001012331.1 | pCMV5-TrkA (Addgene plasmid |
| | | 15002) |
| Golga5 | NM_005113.2 | pCMV6-XL5-Golga5 (Origene |
| | | plasmid SC116934) |
| RET | NM_020975.4 | pGEM-T-Ret (Sino Biological |
| | | plasmid HG11997-G) |
| ROS1 | NM_002944.2 | pENTR223.1-Ros1 (Dana Farber/ |
| | | Harvard Cancer Center DNA Resource |
| | | Core plasmid HsCD00294952) |
| PWWP2A | NM_052927.2 | pCR4-TOPO-PWWP2A (Dana Farber/ |
| | | Harvard Cancer Center DNA Resource |
| | | Core plasmid HsCD00341819) |
| ALK | NM_004304.4 | pDONR223-ALK (Addgene plasmid |
| | | 23917) |
| DCTN1 | NM_004082.4 | pCMV6-XL4 DCTN1 (Origene plasmid |
| | | SC110869) |

TABLE 11
Genomic positions of 5′ and 3′ fusion proteins.

| | | | | |
|---|---|---|---|---|
| Gene | | Genomic position* | Genomic position | Genomic position |
| name | Accession # | (full gene) | (fused portion) | (non-fused portion) |

5′ fusion genes

| | | | | |
|---|---|---|---|---|
| CLIP1 | NM_002956 | chr12: 122755981- | chr12: 122772967- | — |
| | | 122907116 | 122907116 | |
| PPFIBP1 | NM_003622 | chr12: 27677045- | chr12: 27677045- | — |
| | | 27848497 | 27809744 | |
| TPM3 | NM_152263 | chr1: 154134289- | chr1: 154148512- | — |
| | | 154164611 | 154164611 | |
| ZCCHC8 | NM_017612 | chr12: 122956146- | chr12: 122985121- | — |
| | | 122985620 | 122985620 | |
| MYO5A | NM_000259 | Chr15: 52599480- | chr15: 52659148- | — |
| | | 52821247 | 52821247 | |
| PWWP2A | NM_052927 | chr5: 159502892- | chr5: 159545753- | — |
| | | 159546452 | 159546452 | |
| GOLGA5 | NM_005113 | chr14: 93260576- | chr14: 93260576- | — |
| | | 93306306 | 93282825 | |
| KIF5B | NM_004521.2 | chr10: 32297938- | chr10: 32311722- | — |
| | | 32345371 | 32345371 | |
| TP53 | NM_001126113 | chr17: 7571720- | chr17: 7571720- | — |
| | | 7590868 | 7571669 | |
| CEP89 | NM_032816 | chr19: 33369904- | chr19: 33390670- | — |
| | | 33462869 | 33462869 | |
| HLA-A | NM_002116 | chr6: 29910247- | chr6: 29910247- | — |
| | | 29913661 | 29913146 | |
| ERC1 | NM_178039 | chr12: 1100404- | chr12: 1100404- | — |
| | | 1605099 | 1299303 | |
| KIAA1598 | NM_001127211 | chr10: 118642888- | chr10: 118687239- | — |
| | | 118765088 | 118765088 | |
| DCTN1 | NM_004082 | chr2: 74588281- | chr2: 74592133- | — |
| | | 74607482 | 74607482 | |
| LSM14A | NM_001114093 | chr19: 34663352- | chr19: 34663352- | — |
| | | 34720420 | 34712701 | |
| LMNA | NM_005572 | chr1: 156084461- | chr1: 156084461- | — |
| | | 156107657 | 156100660 | |
| FMN1 | NM_001277313 | chr15: 33057745- | chr15: 33090935- | — |
| | | 33486934 | 33486934 | |

3′ fusion kinases

| | | | | |
|---|---|---|---|---|
| ROS1 | NM_002944 | chr6: 117609530- | chr6: 117609530- | chr6: 117645619- |
| | | 117747018 | 117645619 | 117747018 |
| ALK | NM_004304 | chr2: 29415640- | chr2: 29415640- | chr2: 29446428- |
| | | 30144477 | 29446428 | 30144477 |
| RET | NM_020975 | chr10: 43572517- | chr10: 43612016- | chr10: 43572517- |
| | | 43625797 | 43625797 | 43612016 |
| NTRK1 | NM_002529 | chr1: 156830671- | chr1: 156844170- | chr1: 156830671- |
| | | 156851642 | 156851642 | 156844170 |
| BRAF | NM_004333 | chr7: 140433813- | chr7: 140433813- | chr7: 140487415- |
| | | 140624564 | 140487415 | 140624564 |

*Predicted genomic position from genome database Human February 2009 (GRCh37/hg19) Assembly on UCSC Genome Browser.

### Example 3

### Functional Validation Studies of Kinase Fusion Proteins in Xenograft Models

[1346] To validate the oncogenic roles of the novel fusion kinases, mouse melan-a cells were stably transduced with PWWP2A-ROS1, DCTN1-ALK, LMNA-NTRK1, GOLGA5-RET fusions. The transduced cells were then injected subcutaneously and bilaterally into the flank of immunocompromised mice. 1.5 million melan-a cells stably transduced with the indicated oncogene or GFP control vector were injected subcutaneously in two separate, 6 week old female NOD-scid, IL2-Rγ^{null} mice. Mice were palpated 3 times a week for the development of tumors over a period of 40 days.

[1347] Mice were monitored for tumor formation every 3 to 4 days. Within 40 days, all injection sites in the fusion kinase groups (PWWP2A-ROS1, DCTN1-ALK, LMNA-NTRK1, GOLGA5-RET) developed rapidly growing tumors similarly to the one observed at the injection sites of melanocytes expressing the known melanoma oncogenes HRAS^{G12V} and NRAS^{G12V} (FIG. 7). No tumors were observed at the injection sites in the control group with melanocytes that had been transduced with GFP (FIG. 7).

[1348] The results of the foregoing functional validation experiments in xenograft models are consistent with previous studies which showed that TPM3-ROS1 (Takeuchi, K. et al. Nat Med 18, 378-81 (2012)), EML4-ALK (Soda, M. et al. Nature 448, 561-6 (2007)), KIF5B-RET (Lipson, D. et al. Nat Med 18, 382-4 (2012); Takeuchi, K. et al. Nat Med 18, 378-81 (2012); Kohno, T. et al. Nat Med 18, 375-7 (2012)) fusions drive tumor formation in non-small cell lung cancers.

### ADDITIONAL DISCLOSURE

[1349] A. A use of a kinase inhibitor for treating melanoma in a patient afflicted with melanoma exhibiting a melanocytic neoplasm having one or more nucleic acid translocations, each nucleic acid translocation coding for a fusion protein comprising a portion of a kinase comprising a kinase domain, wherein the fusion protein has enhanced kinase activity as compared to a kinase in a control sample without the translocation.
[1350] B. A method for treating melanoma in a patient afflicted with melanoma and exhibiting melanocytic neoplasm having one or more nucleic acid translocations, each nucleic acid translocation coding for a fusion protein comprising a portion of a kinase comprising a kinase domain, the method comprising:
   [1351] administering to the patient an effective amount of a kinase inhibitor that inhibits the kinase, the kinase domain of which is a constituent of said fusion protein.
[1352] C. A use or a method of determining whether a patient exhibiting melanocytic neoplasm is a candidate for treatment with a kinase inhibitor comprising:
   [1353] translocations in a lesion of the patient with a first reagent, each nucleic acid translocation coding for a fusion protein comprising a portion of a kinase comprising a kinase domain.
[1354] D. The method or use of any one of Paragraphs A-C, wherein the fusion protein further comprises a portion of a fusion partner.
[1355] E. The method or use of any one of Paragraphs A-D, wherein the kinase portion in the fusion protein lacks all or a portion of an extracellular receptor domain.
[1356] F. The method or use of any one of Paragraphs A-E, wherein the kinase is selected from the group consisting of ROS1, ALK, BRAF, RET, and NTRK1.
[1357] G. The method or use of Paragraph D, wherein the portion of the protein partner comprises a coiled coil domain.
[1358] H. The method of Paragraph G, wherein the fusion partner is selected from the group consisting of HLA-A, MYO5A, PPFIBP1, ERC1, PWWP2A, CLIP1, TPM3, KIAA1598, DCTN1, TP53, LMNA, GOLGA, KIF5B, CEP89, FMN1 and LSM14A.
[1359] I. The method of Paragraph C, wherein the first reagent is a set of reagents, wherein each reagent in the set detects a different nucleic acid translocation.
[1360] J. A composition comprising a set of first reagents, the set comprising a reagent that detects a translocation in a nucleic acid coding for a fusion protein comprising a portion of a ROS1 kinase, a reagent that detects a translocation in a nucleic acid coding for a fusion protein comprising a portion of a ALK kinase, a reagent that detects a translocation in a nucleic acid coding for a fusion protein comprising a portion of a BRAF kinase, a reagent that detects a translocation in a nucleic acid coding for a fusion protein comprising a portion of a RET kinase, and a reagent that detects a translocation in a nucleic acid coding for a fusion protein comprising a portion of a NTRK1 kinase.
[1361] K. The composition of Paragraph J, further comprising a second reagent that specifically detects the full length kinase, or detects a portion of the full length kinase that is not containing the kinase domain.
[1362] L. The composition of Paragraph J, wherein the second reagent specifically detects all or a portion of another protein partner that the kinase is fused to, wherein the protein partner is selected from the group consisting of HLA-A, MYO5A, PPFIBP1, ERC1, PWWP2A, CLIP1, TPM3, KIAA1598, DCTN1. TP53, LMNA, GOLGA, KIF5B, CEP89, FMN1 and LSM14A.
[1363] M. The composition of Paragraph J, wherein the first reagent is a probe that specifically binds to the nucleic acid coding for the fusion protein.
[1364] N. The composition of Paragraph J, wherein the first reagent is a probe that specifically binds to a nucleic acid coding for the fusion protein wherein the probes comprise:
   [1365] a) at least one 3′ ROS1 probe that hybridizes with all or a portion of a sequence selected from the group consisting of:
   [1366] nucleotide position 5757 to position 7243 of SEQ ID NO: 1; or
   [1367] b) at least one 3′ ALK probe that hybridizes with all or a portion of a sequence selected from the group consisting of:
   [1368] nucleotide position 4125 to position 5815 of SEQ ID NO:7; or
   [1369] c) at least one 3′ BRAF probe that hybridizes with all or a portion of a sequence selected from the group consisting of:
   [1370] nucleotide position 1202 to position 2362 of SEQ ID NO:1; or
   [1371] d) at least one 3′ RET probe that hybridizes with all or a portion of a sequence selected from the group consisting of:
   [1372] nucleotide position 2327 to position 3409 of SEQ ID NO:5; or
   [1373] e) at least one 3′ NTRK1 probe that hybridizes with all or a portion of a sequence selected from the group consisting of:
   [1374] 3 and, a nucleotide sequence that is at least 70% identical to any of these sequences.
[1375] O. The composition of Paragraph K, wherein the second reagent is a probe that specifically binds to a nucleic acid encoding the full length kinase or specifically binds to a nucleic acid encoding a portion of the full length kinase not containing the kinase domain.
[1376] P. The composition of Paragraph K, wherein the second reagent is a probe that specifically binds to a nucleic acid coding for the fusion protein wherein the probes comprise:
   [1377] a) at least one 5′ ROS1 probe that hybridizes with all or a portion of a sequence selected from the group consisting of:
   [1378] nucleotide position 1 to position 5757 of SEQ ID NO: 11; or
   [1379] b) at least one 5′ ALK probe that hybridizes with all or a portion of a sequence selected from the group consisting of:
   [1380] nucleotide position 1 to position 4125 of SEQ ID NO:7; or
   [1381] c) at least one 5′ BRAF probe that hybridizes with all or a portion of a sequence selected from the group consisting of:
   [1382] nucleotide position 1 to position 1202 of SEQ ID NO:1; or
   [1383] d) at least one 5′ RET probe that hybridizes with all or a portion of a sequence selected from the group consisting of:
   [1384] nucleotide position 1 to position 2327 of SEQ ID NO:5; or
   [1385] e) at least one 5′ NTRK1 probe that hybridizes with all or a portion of a sequence selected from the group consisting of:
   [1386] nucleotide position 1 to position 1234 of SEQ ID NO:3
   [1387] and, a nucleotide sequence that is at least 70% identical to any of these sequences.
[1388] Q. The composition of Paragraph L, wherein the second reagent is a probe that specifically binds to a nucleic acid coding for all or a portion of another protein partner that the kinase is fused to, wherein the probes comprise:
   [1389] a) at least one 5′ HLA-A probe that hybridizes with all or a portion of a sequence selected from the group consisting of:
   [1390] nucleotide position 1 to position 1096 of SEQ ID NO: 37; or
   [1391] b) at least one 5′ MYO5A probe that hybridizes with all or a portion of a sequence selected from the group consisting of:
   [1392] nucleotide position 1 to position 3404 of SEQ ID NO: 29; or
   [1393] c) at least one 5′ PPFIBP1 probe that hybridizes with all or a portion of a sequence selected from the group consisting of:
   [1394] nucleotide position 1 to position 2423 of SEQ ID NO:19; or
   [1395] d) at least one 5′ ERC1 probe that hybridizes with all or a portion of a sequence selected from the group consisting of:
   [1396] nucleotide position 1 to position 2644 of SEQ ID NO: 41; or
   [1397] e) at least one 5′ PWWP2A probe that hybridizes with all or a portion of a sequence selected from the group consisting of:
   [1398] nucleotide position 1 to position 641 of SEQ ID NO: 33; or
   [1399] f) at least one 5′ CLIP1 probe that hybridizes with all or a portion of a sequence selected from the group consisting of:
   [1400] nucleotide position 1 to position 3887 of SEQ ID NO: 15; or
   [1401] g) at least one 5′ TPM3 probe that hybridizes with all or a portion of a sequence selected from the group consisting of:
   [1402] nucleotide position 1 to position 494 of SEQ ID NO: 9; or
   [1403] h) at least one 5′ KIAA1598 probe that hybridizes with all or a portion of a sequence selected from the group consisting of:
   [1404] nucleotide position 1 to position 1610 of SEQ ID NO: 64; or
   [1405] i) at least one 5′ DCTN1 probe that hybridizes with all or a portion of a sequence selected from the group consisting of:
   [1406] nucleotide position 1 to position 3514 of SEQ ID NO: 66; or
   [1407] all or a portion of a sequence selected from the group consisting of: nucleotide position 1 to position 2651 of SEQ ID NO: 62; or
   [1408] k) at least one 5′ LMNA probe that hybridizes with all or a portion of a sequence selected from the group consisting of:
   [1409] nucleotide position 1 to position 762 of SEQ ID NO: 70; or
   [1410] 1) at least one 5′ ZCCHC8 probe that hybridizes with all or a portion of a sequence selected from the group consisting of:
   [1411] nucleotide position 1 to position 357 of SEQ ID NO: 25; or
   [1412] m) at least one 5′ GOLGA probe that hybridizes with all or a portion of a sequence selected from the group consisting of:
   [1413] nucleotide position 1 to position 1802 of SEQ ID NO: 47; or
   [1414] n) at least one 5′ KIF5B probe that hybridizes with all or a portion of a sequence selected from the group consisting of:
   [1415] nucleotide position 1 to position 2384 of SEQ ID NO: 55; or
   [1416] o) at least one 5′ CEP89 probe that hybridizes with all or a portion of a sequence selected from the group consisting of:
   [1417] nucleotide position 1 to position 1964 of SEQ ID NO: 51; or
   [1418] p) at least one 5′ LSM14A probe that hybridizes with all or a portion of a sequence selected from the group consisting of:
   [1419] nucleotide position 1 to position 1621 of SEQ ID NO: 68; or
   [1420] q) at least one 5′ FMN1 probe that hybridizes with all or a portion of a sequence selected from the group consisting of:
   [1421] nucleotide position 1 to position 4634 of SEQ ID NO: 72

[1422] and, a nucleotide sequence that is at least 70% identical to any of these sequences.
[1423] R. The composition of any one of Paragraph I-F, wherein the kinase ROS1, ALK, BRAF, RET, or NTRK1 is fused with another gene that is not HLA-A, MYO5A, PPFIBP1, ERC1, PWWP2A, CLIP1, TPM3, KIAA1598, DCTN1, TP53, LMNA, GOLGA, KIF5B, CEP89, FMN1 or LSM14A.
[1424] S. The composition of any one of Paragraph J-L, wherein the first reagent is a set of primers that specifically amplifies all or a portion of the nucleic acid translocation.
[1425] T. The composition of Paragraph J, wherein the set of primers amplify a nucleic acid coding for a fusion junction between the portion of the protein partner and the kinase domain.
[1426] U. The composition of Paragraph I or J, wherein the second reagent is a set of primers that specifically amplifies all or a portion of the full length kinase, wherein the portion of the full length kinase does not include the kinase domain.
[1427] V. The composition of Paragraph L, wherein the second reagent is a set of primers that specifically amplifies all or a portion of all or a portion of another protein partner that the kinase is fused to, wherein the protein partner is selected from the group consisting of HLA-A, MYO5A, PPFIBP1, ERC1, PWWP2A, CLIP1, TPM3, KIAA1598, DCTN1, TP53, LMNA, GOLGA, KIF5B, CEP89, FMN1 and LSM14A.
[1428] W. The composition of any one of Paragraphs A-F, wherein the first reagent is an antibody that specifically binds to the fusion protein.
[1429] X. The composition of Paragraph K, wherein the second reagent is an antibody that specifically binds to the full length kinase but not to the fusion protein.
[1430] Y. The composition of Paragraph M, wherein the second reagent an antibody that specifically binds to all or a portion of all or a portion of another protein partner that the kinase is fused to, wherein the protein partner is selected from the group consisting of HLA-A, MYO5A, PPFIBP1, ERC1, PWWP2A, CLIP1, TPM3, KIAA1598, DCTN1, TP53, LMNA, GOLGA, KIF5B, CEP89, FMN1 and LSM14A.
[1431] Z. The method or use of the composition of any one of Paragraphs J-Y for selecting a patient having a nucleic acid translocation for treatment with a kinase inhibitor.
[1432] AA. The method or use of the composition of any one of Paragraphs J-V to detect the presence of a nucleic acid translocation in a sample to identify a Spitz neoplasm.
[1433] BB. The method or use of the composition of any one of Paragraphs J-V in a method of treating a patient having melanoma with a kinase inhibitor.
[1434] CC. The method or use of Paragraphs Z or AA, wherein the kinase inhibitor is effective to inhibit the kinase domain of the fusion protein.
[1435] DD. A method of identifying whether a melanocytic tumor is likely to be responsive to a tyrosine kinase inhibitor or a serine/threonine kinase inhibitor comprising:
   [1436] (a) contacting a test sample of the tumor with at least one first reagent that detects a translocation in a nucleic acid molecule encoding a kinase protein, wherein the translocation has been determined to cause enhanced kinase activity in the tumor as compared to the same kinase in a control sample without the translocation;
   [1437] (b) if the first reagent produces a positive reading for the translocation, identifying the tumor as likely to respond to a specific tyrosine kinase or serine/threonine kinase inhibitor; and if the first reagent produces a negative reading for the translocation, identifying the tumor as not likely to respond to a specific tyrosine or serine/threonine kinase inhibitor.
[1438] EE. Use according to Paragraph A wherein said patient is afflicted with a spitzoid melanoma.
[1439] FF. The method or use of Paragraph BB wherein said kinase inhibitor is selected from the group of kinase inhibitors in Table 10.
[1440] GG. The method or use of claim 28 wherein the kinase inhibitor is selected from the group consisting of vemurafenib (also known as RG7204; or PLX4032; or Zelboraf); GDC-0879; PLX-4702; AZ628; dabrafenib (also known as GSK2118346); LGX818; BMS-908662, PLX3603, RAF265, RO5185426, trametinib; Sorafenib Tosylate; pyrazolopyrimidine PP1 and PP2; indocarbazole derivative CEP-701 (also known as lestaurtinib) and CEP-751; 2-indolinone RPI-1; quinazoline, ZD6474; and TG101209; vandetanib, cabozantinib; AZ-23; indenopyrrolocarboazole 12a; oxindole 3; isothiazole 5n; thiazole 20h; dasatinib; AZ64; TAE-684 (also known as “NVP-TAE694”), PF02341066 (also known as “crizotinib” or “1066” or Xalkori), LDK-378, ASP-3026, CEP-37440, CEP-28122, CEP-108050, MK-2206, perifosine, sorafenib; AP26113; Ganetespib; 4, X-276, X-376, X-396, CH5424802 (also known as AF-802), GSK1838705, PHA-E429, CRL151104A; alisertib (MLN8237), axitinib (AG013736), bosutinib (SKI-606), cediranib (RECENTIN™, AZD2171), dasatinib (SPRYCEL®, BMS-354825), deforolimus (AP23573/MK-8669), dovitinib lactate (TKI258, CHIR-258), enzastaurin (LY317615), everolimus (RAD011), erlotinib (TARCEVA®), fostamatinib (FosDiR788), gefitinib (IRESSA®), imatinib (Gleevec®, CGP57148B, STI-571), ibrutinib (PCI-32765), lapatinib (TYKERB®, TYVERB®), lestaurtinib (CEP-701), neratinib (HKI-272), nilotinib (TASIGNA®), pacritinib (SB1518), ponatinib (Iclusig), semaxanib (semaxinib, SU5416), sorafenib (NEXAVAR®), sunitinib (SUTENT®, SU11248), temsirolimus (CCI-779/Torisel), tipifarnib (Zarnestra, R115777), tivozanib (AV-951), toceranib (PALLADIA®), vandetanib, vatalanib (PTK787, PTK/ZK), ENMD-2076, PCI-32765, AC220, BIBW 2992 (TOVOK™). SGX523, PF-04217903, PF-02341066, PF-299804, BMS-777607, ABT-869, MP470, BIBF 1120 (VARGATEF®), AP24534, JNJ-26483327, MGCD265, DCC-2036, BMS-690154, CEP-11981, OSI-930, MM-121, XL-184, XL-647, LDK378, GS-1101 (CAL-101), MK-2206, perifosine, LGX818, BMS-908662, PLX3603, RAF265, RO5185426, trametinib, cabozantinib, AZ64, AP26113, X-276, X-376, X-396, C115424802 (AF-802), GSK1838705, ASP3026, PHA-E429, CRL151104A and XL228.
[1441] HH. An isolated nucleic acid molecule comprising a polynucleotide sequence that is at least 70% identical to a sequence selected from the group consisting of: SEQ ID No: 13, SEQ ID No:92, SEQ ID No:17, SEQ ID No:86, SEQ ID No:21, SEQ ID No:94, SEQ ID No:23, SEQ ID No:96, SEQ ID No:27, SEQ ID No:84, SEQ ID No:31, SEQ ID No:90, SEQ ID No:43, SEQ ID No:98, SEQ ID No:45, SEQ ID No: 102, SEQ ID No:53, SEQ ID No: 100, SEQ ID No:57, SEQ ID No:106, SEQ ID No:59, SEQ ID No:107, SEQ ID No:60, SEQ ID No:108, SEQ ID No:61, SEQ ID No: 109, SEQ ID No:49, SEQ ID No: 104, SEQ ID No:35, SEQ ID No:82, SEQ ID No:39, SEQ ID No:88, SEQ ID No:74, SEQ ID No:76, SEQ ID No:78, SEQ ID No:80, SEQ ID No:110, or SEQ ID No: 112.
[1442] II. An isolated polypeptide molecule comprising a polypeptide sequence that is at least 70% identical to a sequence selected from the group consisting of: SEQ ID NO: 14, SEQ ID NO:93, SEQ ID NO: 18, SEQ ID NO:87, SEQ ID NO:22, SEQ ID NO:95, SEQ ID NO:24, SEQ ID NO:97, SEQ ID NO:28, SEQ ID NO:85, SEQ ID NO:32, SEQ ID NO:91, SEQ ID NO:44, SEQ ID NO:99, SEQ ID NO:46, SEQ ID NO: 103, SEQ ID NO:54, SEQ ID NO: 101, SEQ ID NO:58, SEQ ID NO:50, SEQ ID NO:105, SEQ ID NO:36, SEQ ID NO:83, SEQ ID NO:40, SEQ ID NO:89, SEQ ID NO:75, SEQ ID NO:77, SEQ ID NO:79, SEQ ID NO:81, SEQ ID NO:111, OR SEQ ID NO:113.
[1443] JJ. The composition of Paragraph J, wherein the first reagent is a set of probes that specifically bind to a nucleic acid wherein the probes comprise:

[1444] a) at least one 3′ ROS1 probe that hybridizes to all or a portion of a genomic sequence selected from chromosome 6 position 117609530 to position 117645619 (Genome Reference Consortium Human Build 37, i.e., GRCh37/hg19);
[1445] b) at least one 3′ ALK probe that hybridizes with all or a portion of a genomic sequence selected from chromosome 2 position 29415640 to position 29446428 (GRCh37/hg19);
[1446] c) at least one 3′ BRAF probe that hybridizes with all or a portion of a genomic sequence selected from chromosome 7 position 140433813 to position 140487415 (GRCh37/hg19);
[1447] d) at least one 3′ RET probe that hybridizes with all or a portion of a genomic sequence selected from chromosome 10 position 43612016 to position 43625797 (GRCh37/hg19); or
[1448] 3′ NTRK1 probe that hybridizes with all or a portion of a genomic sequence selected from chromosome 1 position 156844170 to position 156851642 (GRCh37/hg19 and, a nucleotide sequence that is at least 70% identical to any of these sequences.
[1449] KK. The composition of Paragraph K, wherein the second reagent is a probe that specifically binds to a nucleic acid wherein the probes comprise:

[1450] b) at least one 5′ ROS1 probe that hybridizes with all or a portion of a genomic sequence selected from chromosome 6 position 117645619 to position 117747018 (GRCh37/hg19)
[1451] b) at least one 5′ ALK probe that hybridizes with all or a portion of a genomic sequence selected from chromosome 2 position 29446428 to position 30144477 (GRCh37/hg19);
[1452] c) at least one 5′ BRAF probe that hybridizes with all or a portion of a genomic sequence selected from chromosome 7 position 140487415 to position 140624564 (GRCh37/hg19);
[1453] d) at least one 5′ RET probe that hybridizes with all or a portion of a genomic sequence selected from chromosome 10 position 43572517 to position 43612016 (GRCh37/hg19); or
[1454] (GRCh37/hg19) and, a nucleotide sequence that is at least 70% identical to any of these sequences.
[1455] LL. The composition of Paragraph L, wherein the second reagent is a probe that specifically binds to a nucleic acid wherein the probes comprise:
   [1456] a) at least one 5′ HLA-A probe that hybridizes with all or a portion of a sequence selected from chromosome 6 position 29910247 to position 29913146 (GRCh37/hg19);
   [1457] b) at least one 5′ MYO5A probe that hybridizes with all or a portion of a sequence selected from chromosome 15 position 52659148 to position 52821247 (GRCh37/hg19);
   [1458] c) at least one 5′ PPFIBP1 probe that hybridizes with all or a portion of a sequence selected from chromosome 12 position 27677045 to position 27809744 (GRCh37/hg19);
   [1459] d) at least one 5′ ERC1 probe that hybridizes with all or a portion of a sequence selected from chromosome 12 position 1100404 to position 1299303 (GRCh37/hg19);
   [1460] e) at least one 5′ PWWP2A probe that hybridizes with all or a portion of a sequence selected from chromosome 5 position 159545753 to position 159546452 (GRCh37/hg19);

[1461] f) at least one 5′ CLIP1 probe that hybridizes with all or a portion of a sequence selected from chromosome 12 position 122772967 to position 122907116 (GRCh37/hg19);
[1462] g) at least one 5′ TPM3 probe that hybridizes with all or a portion of a sequence selected from chromosome 1 position 154148512 to position 154164611 (GRCh37/hg19);
[1463] h) at least one 5′ KIAA1598 probe that hybridizes with all or a portion of a sequence selected from chromosome 10 position 118687239 to position 118765088 (GRCh37/hg19);
[1464] i) at least one 5′ DCTN1 probe that hybridizes with all or a portion of a sequence selected from chromosome 2 position 74592133 to position 74607482 (GRCh37/hg19);
[1465] j) at least one 5′ TP53 probe that hybridizes with all or a portion of a sequence selected from chromosome 17 position 7571720 to position 7571669 (GRCh37/hg19);
[1466] k) at least one 5′ LMNA probe that hybridizes with all or a portion of a sequence selected from chromosome 1 position 156084461 to position 156100660 (GRCh37/hg19);
[1467] l) at least one 5′ ZCCHC8 probe that hybridizes with all or a portion of a sequence selected from chromosome 12 position 122985121 to position 122985620 (GRCh37 hg19);
[1468] m) at least one 5′ GOLGA probe that hybridizes with all or a portion of a sequence selected from chromosome 14 position 93260576 to position 93282825 (GRCh37/hg19);
[1469] n) at least one 5′ KIF5B probe that hybridizes with all or a portion of a sequence selected from chromosome 10 position 32311722 to position 32345371 (GRCh37/hg19):
[1470] o) at least one 5′ CEP89 probe that hybridizes with all or a portion of a sequence selected from chromosome 19 position 33390670 to position 33462869 (GRCh37/hg19);
[1471] p) at least one 5′ LSM14A probe that hybridizes with all or a portion of a sequence selected from chromosome 19 position 34663352 to position 34712701 (GRCh37/hg19); or
[1472] all or a portion of a sequence selected from chromosome 15 position 33090935 to position 33486934 (GRCh37 hg19 and, a nucleotide sequence that is at least 70% identical to any of these sequences.

### EQUIVALENTS

[1473] Those skilled in the art will recognize, or be able to ascertain using no more than routine experimentation, many equivalents to the specific embodiments described herein. Such equivalents are intended to be encompassed by the following claims.

We claim:

1. An isolated or purified nucleic acid molecule that encodes a fusion, or a breakpoint comprising fragment thereof, chosen from CLIP1-ROS1; PPFIBP1-ROS1; TPM3-ROS1; ZCCHC8-ROS1; MYO5A-ROS1; PWWP2A-ROS1; HLA-A-ROS1; ERC1-ROS1; TPM3-ALK; GOLGA5-RET; CEP89-BRAF; KIF5B-RET; or TP53-NTRK1, summarized in FIG. 1A-1C, or a sequence at least 85% identical thereto.

2. A nucleic acid molecule that is capable of hybridizing to a fusion comprising the nucleotide sequence of CLIP1-ROS1; PPFIBP1-ROS1; TPM3-ROS1; ZCCHC8-ROS1; MYO5A-ROS1; PWWP2A-ROS1; HLA-A-ROS1; ERC1-ROS1; TPM3-ALK; GOLGA5-RET; CEP89-BRAF; KIF5B-RET; or TP53-NTRK1, summarized in FIG. 1A-1C, or a fragment thereof comprising a breakpoint.

3. A fragment of the nucleic acid molecule of either of claims 1-2, wherein said fragment comprises oligonucleotides between 10 and 25 nucleotides in length, or between 100 to 300 nucleotides in length.

4. The fragment of claim 3, which is a probe or primer that includes an oligonucleotide between about 5 and 25 nucleotides in length.

5. The fragment of claim 3, which is a bait that comprises an oligonucleotide between about 100 to 300 nucleotides, 130 and 230 nucleotides, or 150 and 200 nucleotides, in length.

6. A nucleic acid molecule of any of claims 1-5 suitable as probe, primer, bait or library member that specifically binds to the fusion.

7. The isolated or purified nucleic acid molecule of any of claims 1-5, which is operatively linked to a native or a heterologous regulatory sequence.

8. An isolated or purified vector comprising a nucleic acid molecule of any of claims 1-5.

9. A host cell comprising a vector of claim 8.

10. A nucleic acid molecule that specifically reduces or inhibits the expression of the nucleic acid molecule of any of claims 1-2.

11. The nucleic acid molecule of claim 10, which is chosen from an antisense molecule, ribozyme, siRNA, or triple helix molecule.

12. An isolated or purified fusion chosen from CLIP1-ROS1; PPFIBP1-ROS1; TPM3-ROS1; ZCCHC8-ROS1; MYO5A-ROS1; PWWP2A-ROS1; HLA-A-ROS1; ERC1-ROS1; TPM3-ALK; GOLGA5-RET; CEP89-BRAF; KIF5B-RET; or TP53-NTRK1, summarized in FIG. 1A-1C, or a fragment thereof, or a sequence at least 85% identical thereto.

13. The isolated or purified fusion polypeptide of claim 12, having a kinase activity, and/or a dimerizing or multimerizing activity.

14. An isolated or purified antibody molecule that specifically binds to the fusion polypeptide of claims 12-13.

15. A reaction mixture comprising:
a detection reagent, or purified or isolated preparation thereof; and
a target nucleic acid derived from a neoplasm or a cancer,
wherein said detection reagent can distinguish a reference sequence from a mutation chosen from: a nucleic acid, or amino acid sequence, having a breakpoint according to FIG. 1A-1C, or an associated mutation.

16. The reaction mixture of claim 15, wherein the detection reagent specifically distinguishes a wild type or another fusion from the fusion nucleic acid.

17. The reaction mixture of claims 15-16, wherein the detection reagent comprises a DNA, RNA or mixed DNA/RNA, molecule which is complementary with a nucleic acid sequence on a target nucleic acid (the detection reagent binding site) wherein the detection reagent binding site is disposed in relationship to the interrogation position such that binding of the detection reagent to the detection reagent binding site allows differentiation of mutant and reference sequences for the mutant.

18. The reaction mixture of any of claims 15-17, wherein the target nucleic acid is from a cancer listed in FIG. 1A, and the detection reagent detects a mutant, e.g., a rearrangement, fusion junction, or fusion of two genes disclosed in FIG. 1A, 1B or 1C.

19. The reaction mixture of claim 18, wherein the target nucleic acid is chosen from one or more:
(i) from a cancer, e.g., a cancer as described herein, and the detection reagent is one that detects a fusion of the CLIP1 and ROS1 genes, e.g., a detection reagent that detects a mutant, e.g., a rearrangement or fusion junction described in FIG. 1A, 1B or 1C or in the section herein entitled Nucleic Acid Molecules, for a fusion of CLIP1 and ROS1;
(ii) from a cancer, e.g., a cancer as described herein, and the detection reagent is one that detects a fusion of the PPFIBP1 and ROS1 genes, e.g., a detection reagent that detects a mutant, e.g., a rearrangement or fusion junction described in FIG. 1A, 1B or 1C or in the section herein entitled Nucleic Acid Molecules, for a fusion of PPFIBP1 and ROS1;
(iii) from cancer, e.g., a cancer as described herein, and the detection reagent is one that detects a fusion of the TPM3 and ROS1 genes, e.g., a detection reagent that detects a mutant, e.g., a rearrangement or fusion junction described in FIG. 1A, 1B or 1C or in the section herein entitled Nucleic Acid Molecules, for a fusion of TPM3 and ROS1;
(iv) from a cancer, e.g., a cancer as described herein, and the detection reagent is one that detects a fusion of the ZCCHC8 and ROS1 genes, e.g., a detection reagent that detects a mutant, e.g., a rearrangement or fusion junction described in FIG. 1A, 1B or 1C or in the section herein entitled Nucleic Acid Molecules, for a fusion of ZCCHC8 and ROS1;
(v) from a cancer, e.g., a cancer as described herein, and the detection reagent is one that detects a fusion of the MYO5A and ROS1 genes, e.g., a detection reagent that detects a mutant, e.g., a rearrangement or fusion junction described in FIG. 1A, 1B or 1C or in the section herein entitled Nucleic Acid Molecules, for a fusion of MYO5A and ROS1;
(vi) from a cancer, e.g., a cancer as described herein, and the detection reagent is one that detects a fusion of the PWWP2A and ROS1 genes, e.g., a detection reagent that detects a mutant, e.g., a rearrangement or fusion junction described in FIG. 1A, 1B or 1C or in the section herein entitled Nucleic Acid Molecules, for a fusion of PWWP2A and ROS1;
(vii) from a cancer, e.g., a cancer as described herein, and the detection reagent is one that detects a fusion of the HLA-A and ROS1 genes, e.g., a detection reagent that detects a mutant, e.g., a rearrangement or fusion junction described in FIG. 1A, 1B or 1C or in the section herein entitled Nucleic Acid Molecules, for a fusion of HLA-A and ROS1;
(viii) from a cancer, e.g., a cancer as described herein, and the detection reagent is one that detects a fusion of the ERC1 and ROS1 genes, e.g., a detection reagent that detects a mutant, e.g., a rearrangement or fusion junction described in FIG. 1A, 1B or 1C or in the section herein entitled Nucleic Acid Molecules, for a fusion of ERC1 and ROS1;
(ix) from a cancer, e.g., a cancer as described herein, and the detection reagent is one that detects a fusion of the TPM3 and ALK genes, e.g., a detection reagent that detects a mutant, e.g., a rearrangement or fusion junction described in FIG. 1A, 1B or 1C or in the section herein entitled Nucleic Acid Molecules, for a fusion of TPM3 and ALK;
(x) from a cancer, e.g., a cancer as described herein, and the detection reagent is one that detects a fusion of the GOLGA5 and RET genes, e.g., a detection reagent that detects a mutant, e.g., a rearrangement or fusion junction described in FIG. 1A, 1B or 1C or in the section herein entitled Nucleic Acid Molecules, for a fusion of GOLGA5 and RET;
(xi) from a cancer, e.g., a cancer as described herein, and the detection reagent is one that detects a fusion of the KIF5B and RET genes, e.g., a detection reagent that detects a mutant, e.g., a rearrangement or fusion junction described in FIG. 1A, 1B or 1C or in the section herein entitled Nucleic Acid Molecules, for a fusion of KIF5B and RET;
(xii) from a cancer, e.g., a cancer as described herein, and the detection reagent is one that detects a fusion of the TP53 and NTRK1 genes, e.g., a detection reagent that detects a mutant, e.g., a rearrangement or fusion junction described in FIG. 1A, 1B or 1C or in the section herein entitled Nucleic Acid Molecules, for a fusion of TP53 and NTRK1; or
(xiii) from a cancer, e.g., a cancer as described herein, and the detection reagent is one that detects a fusion of the CEP89 and BRAF genes, e.g., a detection reagent that detects a mutant, e.g., a rearrangement or fusion junction described in FIG. 1A, 1B or 1C or in the section herein entitled Nucleic Acid Molecules, for a fusion of CEP89 and BRAF.

20. A method of making a reaction mixture comprising:
combining a detection reagent, or purified or isolated preparation thereof, with a target nucleic acid derived from neoplasm or cancer of claim 19, wherein said detection reagent can distinguish a reference sequence from a mutation described herein, or an associated mutation.

21. A purified or isolated preparation of a fusion nucleic acid molecule from a neoplasm or cancer disposed in a sequencing device, or a sample holder for use in such a device, wherein said mutation described herein, or an associated mutation.

22. A purified or isolated preparation of a fusion nucleic acid molecule from a neoplasm or cancer disposed in a device for determining a physical or chemical property, e.g., stability of a duplex, e.g., Tₘ or a sample holder for use in such a device, wherein said, wherein said mutation is described herein, or an associated mutation.

23. A detection reagent comprising a DNA, RNA or mixed DNA/RNA molecule, comprising a nucleotide sequence which is complementary with a nucleic acid sequence on a target nucleic acid in which the detection reagent binding site is disposed in relationship to the interrogation position such that binding (or in embodiments, lack of binding) of the detection reagent to the detection reagent binding site allows differentiation of a mutant and a reference sequence and said target nucleic acid is derived from a neoplasm or cancer,
wherein said mutation described herein or an associated mutation.

24. A purified or isolated preparations of a fusion nucleic acid molecule, e.g., DNA, e.g., genomic DNA or cDNA, or RNA, containing an interrogation position useful for determining if a mutation is present, wherein said nucleic acid molecule is derived from a neoplasm or cancer, wherein said mutation described herein, or an associated mutation.

25. A reaction mixture, comprising:
a detection reagent, or purified or isolated preparation thereof, e.g., a substrate, e.g., a substrate for phosphorylation or other activity, or an antibody, and
a target fusion protein derived from a neoplasm or a cancer, wherein the detection reagent is specific for a fusion described herein, e.g., as summarized in FIGS. 1A-1C.

26. A method of making a reaction mixture comprising:
combining a detection reagent, or purified or isolated preparation thereof, e.g., a substrate, e.g., a substrate for phosphorylation or other activity, or an antibody, described herein with a target fusion protein derived from a neoplasm or cancer, wherein the detection reagent is specific for a fusion described herein e.g., as summarized in FIGS. 1A-1C.

27. A kit comprising a detection reagent of claim 23.

The application's sequence listing, which the Patent Office published only in electronic form, follows.

SEQUENCE LISTING (113 sequences)

SEQ ID NO: 1 - DNA, 2949 bp, Homo sapiens
cgcctcccttccccctccccgcccgacagcggccgctcgggccccggctctcggttataagatggcggcgctgagcggtggcggtggtggcggcgcggagccgggccaggctctgttcaacggggacatggagcccgaggccggcgccggcgccggcgccgcggcctcttcggctgcggaccctgccattccggaggaggtgtggaatatcaaacaaatgattaagttgacacaggaacatatagaggccctattggacaaatttggtggggagcataatccaccatcaatatatctggaggcctatgaagaatacaccagcaagctagatgcactccaacaaagagaacaacagttattggaatctctggggaacggaactgatttttctgtttctagctctgcatcaatggataccgttacatcttcttcctcttctagcctttcagtgctaccttcatctctttcagtttttcaaaatcccacagatgtggcacggagcaaccccaagtcaccacaaaaacctatcgttagagtcttcctgcccaacaaacagaggacagtggtacctgcaaggtgtggagttacagtccgagacagtctaaagaaagcactgatgatgagaggtctaatcccagagtgctgtgctgtttacagaattcaggatggagagaagaaaccaattggttgggacactgatatttcctggcttactggagaagaattgcatgtggaagtgttggagaatgttccacttacaacacacaactttgtacgaaaaacgtttttcaccttagcattttgtgacttttgtcgaaagctgcttttccagggtttccgctgtcaaacatgtggttataaatttcaccagcgttgtagtacagaagttccactgatgtgtgttaattatgaccaacttgatttgctgtttgtctccaagttctttgaacaccacccaataccacaggaagaggcgtccttagcagagactgccctaacatctggatcatccccttccgcacccgcctcggactctattgggccccaaattctcaccagtccgtctccttcaaaatccattccaattccacagcccttccgaccagcagatgaagatcatcgaaatcaatttgggcaacgagaccgatcctcatcagctcccaatgtgcatataaacacaatagaacctgtcaatattgatgacttgattagagaccaaggatttcgtggtgatggaggatcaaccacaggtttgtctgctaccccccctgcctcattacctggctcactaactaacgtgaaagccttacagaaatctccaggacctcagcgagaaaggaagtcatcttcatcctcagaagacaggaatcgaatgaaaacacttggtagacgggactcgagtgatgattgggagattcctgatgggcagattacagtgggacaaagaattggatctggatcatttggaacagtctacaagggaaagtggcatggtgatgtggcagtgaaaatgttgaatgtgacagcacctacacctcagcagttacaagccttcaaaaatgaagtaggagtactcaggaaaacacgacatgtgaatatcctactcttcatgggctattccacaaagccacaactggctattgttacccagtggtgtgagggctccagcttgtatcaccatctccatatcattgagaccaaatttgagatgatcaaacttatagatattgcacgacagactgcacagggcatggattacttacacgccaagtcaatcatccacagagacctcaagagtaataatatatttcttcatgaagacctcacagtaaaaataggtgattttggtctagctacagtgaaatctcgatggagtgggtcccatcagtttgaacagttgtctggatccattttgtggatggcaccagaagtcatcagaatgcaagataaaaatccatacagctttcagtcagatgtatatgcatttggaattgttctgtatgaattgatgactggacagttaccttattcaaacatcaacaacagggaccagataatttttatggtgggacgaggatacctgtctccagatctcagtaaggtacggagtaactgtccaaaagccatgaagagattaatggcagagtgcctcaaaaagaaaagagatgagagaccactctttccccaaattctcgcctctattgagctgctggcccgctcattgccaaaaattcaccgcagtgcatcagaaccctccttgaatcgggctggtttccaaacagaggattttagtctatatgcttgtgcttctccaaaaacacccatccaggcagggggatatggtgcgtttcctgtccactgaaacaaatgagtgagagagttcaggagagtagcaacaaaaggaaaataaatgaacatatgtttgcttatatgttaaattgaataaaatactctctttttttttaaggtgaaccaaagaacacttgtgtggttaaagactagatataatttttccccaaactaaaatttatacttaacattggatttttaacatccaagggttaaaatacatagacattgctaaaaattggcagagcctcttctagaggctttactttctgttccgggtttgtatcattcacttggttattttaagtagtaaacttcagtttctcatgcaacttttgttgccagctatcacatgtccactagggactccagaagaagaccctacctatgcctgtgtttgcaggtgagaagttggcagtcggttagcctgggttagataaggcaaactgaacagatctaatttaggaagtcagtagaatttaataattctattattattcttaataatttttctataactatttctttttataacaatttggaaaatgtggatgtcttttatttccttgaagcaataaactaagtttctttttataaaaa

SEQ ID NO: 2 - protein, 766 aa, Homo sapiens [sequence omitted]

SEQ ID NO: 3 - DNA, 2663 bp, Homo sapiens
tgcagctgggagcgcacagacggctgccccgcctgagcgaggcgggcgccgccgcgatgctgcgaggcggacggcgcgggcagcttggctggcacagctgggctgcggggccgggcagcctgctggcttggctgatactggcatctgcgggcgccgcaccctgccccgatgcctgctgcccccacggctcctcgggactgcgatgcacccgggatggggccctggatagcctccaccacctgcccggcgcagagaacctgactgagctctacatcgagaaccagcagcatctgcagcatctggagctccgtgatctgaggggcctgggggagctgagaaacctcaccatcgtgaagagtggtctccgtttcgtggcgccagatgccttccatttcactcctcggctcagtcgcctgaatctctccttcaacgctctggagtctctctcctggaaaactgtgcagggcctctccttacaggaactggtcctgtcggggaaccctctgcactgttcttgtgccctgcgctggctacagcgctgggaggaggagggactgggcggagtgcctgaacagaagctgcagtgtcatgggcaagggcccctggcccacatgcccaatgccagctgtggtgtgcccacgctgaaggtccaggtgcccaatgcctcggtggatgtgggggacgacgtgctgctgcggtgccaggtggaggggcggggcctggagcaggccggctggatcctcacagagctggagcagtcagccacggtgatgaaatctgggggtctgccatccctggggctgaccctggccaatgtcaccagtgacctcaacaggaagaacgtgacgtgctgggcagagaacgatgtgggccgggcagaggtctctgttcaggtcaacgtctccttcccggccagtgtgcagctgcacacggcggtggagatgcaccactggtgcatccccttctctgtggatgggcagccggcaccgtctctgcgctggctcttcaatggctccgtgctcaatgagaccagcttcatcttcactgagttcctggagccggcagccaatgagaccgtgcggcacgggtgtctgcgcctcaaccagcccacccacgtcaacaacggcaactacacgctgctggctgccaaccccttcggccaggcctccgcctccatcatggctgccttcatggacaaccctttcgagttcaaccccgaggaccccatccctgtctccttctcgccggtggacactaacagcacatctggagacccggtggagaagaaggacgaaacaccttttggggtctcggtggctgtgggcctggccgtctttgcctgcctcttcctttctacgctgctccttgtgctcaacaaatgtggacggagaaacaagtttgggatcaaccgcccggctgtgctggctccagaggatgggctggccatgtccctgcatttcatgacattgggtggcagctccctgtcccccaccgagggcaaaggctctgggctccaaggccacatcatcgagaacccacaatacttcagtgatgcctgtgttcaccacatcaagcgccgggacatcgtgctcaagtgggagctgggggagggcgcctttgggaaggtcttccttgctgagtgccacaacctcctgcctgagcaggacaagatgctggtggctgtcaaggcactgaaggaggcgtccgagagtgctcggcaggacttccagcgtgaggctgagctgctcaccatgctgcagcaccagcacatcgtgcgcttcttcggcgtctgcaccgagggccgccccctgctcatggtctttgagtatatgcggcacggggacctcaaccgcttcctccgatcccatggacctgatgccaagctgctggctggtggggaggatgtggctccaggccccctgggtctggggcagctgctggccgtggctagccaggtcgctgcggggatggtgtacctggcgggtctgcattttgtgcaccgggacctggccacacgcaactgtctagtgggccagggactggtggtcaagattggtgattttggcatgagcagggatatctacagcaccgactattaccgtgtgggaggccgcaccatgctgcccattcgctggatgccgcccgagagcatcctgtaccgtaagttcaccaccgagagcgacgtgtggagcttcggcgtggtgctctgggagatcttcacctacggcaagcagccctggtaccagctctccaacacggaggcaatcgactgcatcacgcagggacgtgagttggagcggccacgtgcctgcccaccagaggtctacgccatcatgcggggctgctggcagcgggagccccagcaacgccacagcatcaaggatgtgcacgcccggctgcaagccctggcccaggcacctcctgtctacctggatgtcctgggctagggggccggcccaggggctgggagtggttagccggaatactggggcctgccctcagcatcccccatagctcccagcagccccagggtgatctcaaagtatctaattcaccctcagcatgtgggaagggacaggtgggggctgggagtagaggatgttcctgcttctctaggcaaggtcccgtcatagcaattatatttattatcccttgaaaaaaaa

SEQ ID NO: 4 - protein, 796 aa, Homo sapiens
MLRGGRRGQLGWHSWAAGPGSLLAWLILASAGAAPCPDACCPHGSSGLRCTRDGALDSLHHLPGAENLTELYIENQQHLQHLELRDLRGLGELRNLTIVKSGLRFVAPDAFHFTPRLSRLNLSFNALESLSWKTVQGLSLQELVLSGNPLHCSCALRWLQRWEEEGLGGVPEQKLQCHGQGPLAHMPNASCGVPTLKVQVPNASVDVGDDVLLRCQVEGRGLEQAGWILTELEQSATVMKSGGLPSLGLTLANVTSDLNRKNVTCWAENDVGRAEVSVQVNVSFPASVQLHTAVEMHHWCIPFSVDGQPAPSLRWLFNGSVLNETSFIFTEFLEPAANETVRHGCLRLNQPTHVNNGNYTLLAANPFGQASASIMAAFMDNPFEFNPEDPIPVSFSPVDTNSTSGDPVEKKDETPFGVSVAVGLAVFACLFLSTLLLVLNKCGRRNKFGINRPAVLAPEDGLAMSLHFMTLGGSSLSPTEGKGSGLQGHIIENPQYFSDACVHHIKRRDIVLKWELGEGAFGKVFLAECHNLLPEQDKMLVAVKALKEASESARQDFQREAELLTMLQHQHIVRFFGVCTEGRPLLMVFEYMRHGDLNRFLRSHGPDAKLLAGGEDVAPGPLGLGQLLAVASQVAAGMVYLAGLHFVHRDLATRNCLVGQGLVVKIGDFGMSRDIYSTDYYRVGGRTMLPIRWMPPESILYRKFTTESDVWSFGVVLWEIFTYGKQPWYQLSNTEAIDCITQGRELERPRACPPEVYAIMRGCWQREPQQRHSIKDVHARLQALAQAPPVYLDVLG

SEQ ID NO: 5 - DNA, 4174 bp, Homo sapiens
agtcccgcgaccgaagcagggcgcgcagcagcgctgagtgccccggaacgtgcgtcgcgcccccagtgtccgtcgcgtccgccgcgccccgggcggggatggggcggccagactgagcgccgcacccgccatccagacccgccggccctagccgcagtccctccagccgtggccccagcgcgcacgggcgatggcgaaggcgacgtccggtgccgcggggctgcgtctgctgttgctgctgctgctgccgctgctaggcaaagtggcattgggcctctacttctcgagggatgcttactgggagaagctgtatgtggaccaggcggccggcacgcccttgctgtacgtccatgccctgcgggacgcccctgaggaggtgcccagcttccgcctgggccagcatctctacggcacgtaccgcacacggctgcatgagaacaactggatctgcatccaggaggacaccggcctcctctaccttaaccggagcctggaccatagctcctgggagaagctcagtgtccgcaaccgcggctttcccctgctcaccgtctacctcaaggtcttcctgtcacccacatcccttcgtgagggcgagtgccagtggccaggctgtgcccgcgtatacttctccttcttcaacacctcctttccagcctgcagctccctcaagccccgggagctctgcttcccagagacaaggccctccttccgcattcgggagaaccgacccccaggcaccttccaccagttccgcctgctgcctgtgcagttcttgtgccccaacatcagcgtggcctacaggctcctggagggtgagggtctgcccttccgctgcgccccggacagcctggaggtgagcacgcgctgggccctggaccgcgagcagcgggagaagtacgagctggtggccgtgtgcaccgtgcacgccggcgcgcgcgaggaggtggtgatggtgcccttcccggtgaccgtgtacgacgaggacgactcggcgcccaccttccccgcgggcgtcgacaccgccagcgccgtggtggagttcaagcggaaggaggacaccgtggtggccacgctgcgtgtcttcgatgcagacgtggtacctgcatcaggggagctggtgaggcggtacacaagcacgctgctccccggggacacctgggcccagcagaccttccgggtggaacactggcccaacgagacctcggtccaggccaacggcagcttcgtgcgggcgaccgtacatgactataggctggttctcaaccggaacctctccatctcggagaaccgcaccatgcagctggcggtgctggtcaatgactcagacttccagggcccaggagcgggcgtcctcttgctccacttcaacgtgtcggtgctgccggtcagcctgcacctgcccagtacctactccctctccgtgagcaggagggctcgccgatttgcccagatcgggaaagtctgtgtggaaaactgccaggcattcagtggcatcaacgtccagtacaagctgcattcctctggtgccaactgcagcacgctaggggtggtcacctcagccgaggacacctcggggatcctgtttgtgaatgacaccaaggccctgcggcggcccaagtgtgccgaacttcactacatggtggtggccaccgaccagcagacctctaggcaggcccaggcccagctgcttgtaacagtggaggggtcatatgtggccgaggaggcgggctgccccctgtcctgtgcagtcagcaagagacggctggagtgtgaggagtgtggcggcctgggctccccaacaggcaggtgtgagtggaggcaaggagatggcaaagggatcaccaggaacttctccacctgctctcccagcaccaagacctgccccgacggccactgcgatgttgtggagacccaagacatcaacatttgccctcaggactgcctccggggcagcattgttgggggacacgagcctggggagccccgggggattaaagctggctatggcacctgcaactgcttccctgaggaggagaagtgcttctgcgagcccgaagacatccaggatccactgtgcgacgagctgtgccgcacggtgatcgcagccgctgtcctcttctccttcatcgtctcggtgctgctgtctgccttctgcatccactgctaccacaagtttgcccacaagccacccatctcctcagctgagatgaccttccggaggcccgcccaggccttcccggtcagctactcctcttccggtgcccgccggccctcgctggactccatggagaaccaggtctccgtggatgccttcaagatcctggaggatccaaagtgggaattccctcggaagaacttggttcttggaaaaactctaggagaaggcgaatttggaaaagtggtcaaggcaacggccttccatctgaaaggcagagcagggtacaccacggtggccgtgaagatgctgaaagagaacgcctccccgagtgagcttcgagacctgctgtcagagttcaacgtcctgaagcaggtcaaccacccacatgtcatcaaattgtatggggcctgcagccaggatggcccgctcctcctcatcgtggagtacgccaaatacggctccctgcggggcttcctccgcgagagccgcaaagtggggcctggctacctgggcagtggaggcagccgcaactccagctccctggaccacccggatgagcgggccctcaccatgggcgacctcatctcatttgcctggcagatctcacaggggatgcagtatctggccgagatgaagctcgttcatcgggacttggcagccagaaacatcctggtagctgaggggcggaagatgaagatttcggatttcggcttgtcccgagatgtttatgaagaggattcctacgtgaagaggagccagggtcggattccagttaaatggatggcaattgaatccctttttgatcatatctacaccacgcaaagtgatgtatggtcttttggtgtcctgctgtgggagatcgtgaccctagggggaaacccctatcctgggattcctcctgagcggctcttcaaccttctgaagaccggccaccggatggagaggccagacaactgcagcgaggagatgtaccgcctgatgctgcaatgctggaagcaggagccggacaaaaggccggtgtttgcggacatcagcaaagacctggagaagatgatggttaagaggagagactacttggaccttgcggcgtccactccatctgactccctgatttatgacgacggcctctcagaggaggagacaccgctggtggactgtaataatgcccccctccctcgagccctcccttccacatggattgaaaacaaactctatggtagaatttcccatgcatttactagattctagcaccgctgtcccctctgcactatccttcctctctgtgatgctttttaaaaatgtttctggtctgaacaaaaccaaagtctgctctgaacctttttatttgtaaatgtctgactttgcatccagtttacatttaggcattattgcaactatgtttttctaaaaggaagtgaaaataagtgtaattaccacattgcccagcaacttaggatggtagaggaaaaaacagatcagggcggaactctcaggggagaccaagaacaggttgaataaggcgcttctggggtgggaatcaagtcatagtacttctactttaactaagtggataaatatacaaatctggggaggtattcagttgagaaaggagccaccagcaccactcagcctgcactgggagcacagccaggttcccccagacccctcctgggcaggcaggtgcctctcagaggccacccggcactggcgagcagccactggccaagcctcagccccagtcccagccacatgtcctccatcaggggtagcgaggttgcaggagctggctggccctgggaggacgcacccccactgctgttttcacatcctttcccttacccaccttcaggacggttgtcacttatgaagtcagtgctaaagctggagcagttgctttttgaaagaacatggtctgtggtgctgtggtcttacaatggacagtaaatatggttcttgccaaaactccttcttttgtctttgattaaatactagaaatttaaaaaaaaaaaaaaa

SEQ ID NO: 6 - protein, 1072 aa, Homo sapiens
MAKATSGAAGLRLLLLLLLPLLGKVALGLYFSRDAYWEKLYVDQAAGTPLLYVHALRDAPEEVPSFRLGQHLYGTYRTRLHENNWICIQEDTGLLYLNRSLDHSSWEKLSVRNRGFPLLTVYLKVFLSPTSLREGECQWPGCARVYFSFFNTSFPACSSLKPRELCFPETRPSFRIRENRPPGTFHQFRLLPVQFLCPNISVAYRLLEGEGLPFRCAPDSLEVSTRWALDREQREKYELVAVCTVHAGAREEVVMVPFPVTVYDEDDSAPTFPAGVDTASAVVEFKRKEDTVVATLRVFDADVVPASGELVRRYTSTLLPGDTWAQQTFRVEHWPNETSVQANGSFVRATVHDYRLVLNRNLSISENRTMQLAVLVNDSDFQGPGAGVLLLHFNVSVLPVSLHLPSTYSLSVSRRARRFAQIGKVCVENCQAFSGINVQYKLHSSGANCSTLGVVTSAEDTSGILFVNDTKALRRPKCAELHYMVVATDQQTSRQAQAQLLVTVEGSYVAEEAGCPLSCAVSKRRLECEECGGLGSPTGRCEWRQGDGKGITRNFSTCSPSTKTCPDGHCDVVETQDINICPQDCLRGSIVGGHEPGEPRGIKAGYGTCNCFPEEEKCFCEPEDIQDPLCDELCRTVIAAAVLFSFIVSVLLSAFCIHCYHKFAHKPPISSAEMTFRRPAQAFPVSYSSSGARRPSLDSMENQVSVDAFKILEDPKWEFPRKNLVLGKTLGEGEFGKVVKATAFHLKGRAGYTTVAVKMLKENASPSELRDLLSEFNVLKQVNHPHVIKLYGACSQDGPLLLIVEYAKYGSLRGFLRESRKVGPGYLGSGGSRNSSSLDHPDERALTMGDLISFAWQISQGMQYLAEMKLVHRDLAARNILVAEGRKMKISDFGLSRDVYEEDSYVKRSQGRIPVKWMAIESLFDHIYTTQSDVWSFGVLLWEIVTLGGNPYPGIPPERLFNLLKTGHRMERPDNCSEEMYRLMLQCWKQEPDKRPVFADISKDLEKMMVKRRDYLDLAASTPSDSLIYDDGLSEEETPLVDCNNAPLPRALPSTWIENKLYGRISHAFTRF

SEQ ID NO: 7 - DNA, 6267 bp, Homo sapiens
agctgcaagtggcgggcgcccaggcagatgcgatccagcggctctgggggcggcagcggtggtagcagctggtacctcccgccgcctctgttcggagggtcgcggggcaccgaggtgctttccggccgccctctggtcggccacccaaagccgcgggcgctgatgatgggtgaggagggggcggcaagatttcgggcgcccctgccctgaacgccctcagctgctgccgccggggccgctccagtgcctgcgaactctgaggagccgaggcgccggtgagagcaaggacgctgcaaacttgcgcagcgcgggggctgggattcacgcccagaagttcagcaggcagacagtccgaagccttcccgcagcggagagatagcttgagggtgcgcaagacggcagcctccgccctcggttcccgcccagaccgggcagaagagcttggaggagccaaaaggaacgcaaaaggcggccaggacagcgtgcagcagctgggagccgccgttctcagccttaaaagttgcagagattggaggctgccccgagaggggacagaccccagctccgactgcggggggcaggagaggacggtacccaactgccacctcccttcaaccatagtagttcctctgtaccgagcgcagcgagctacagacgggggcgcggcactcggcgcggagagcgggaggctcaaggtcccagccagtgagcccagtgtgcttgagtgtctctggactcgcccctgagcttccaggtctgtttcatttagactcctgctcgcctccgtgcagttgggggaaagcaagagacttgcgcgcacgcacagtcctctggagatcaggtggaaggagccgctgggtaccaaggactgttcagagcctcttcccatctcggggagagcgaagggtgaggctgggcccggagagcagtgtaaacggcctcctccggcgggatgggagccatcgggctcctgtggctcctgccgctgctgctttccacggcagctgtgggctccgggatggggaccggccagcgcgcgggctccccagctgcggggccgccgctgcagccccgggagccactcagctactcgcgcctgcagaggaagagtctggcagttgacttcgtggtgccctcgctcttccgtgtctacgcccgggacctactgctgccaccatcctcctcggagctgaaggctggcaggcccgaggcccgcggctcgctagctctggactgcgccccgctgctcaggttgctggggccggcgccgggggtctcctggaccgccggttcaccagccccggcagaggcccggacgctgtccagggtgctgaagggcggctccgtgcgcaagctccggcgtgccaagcagttggtgctggagctgggcgaggaggcgatcttggagggttgcgtcgggccccccggggaggcggctgtggggctgctccagttcaatctcagcgagctgttcagttggtggattcgccaaggcgaagggcgactgaggatccgcctgatgcccgagaagaaggcgtcggaagtgggcagagagggaaggctgtccgcggcaattcgcgcctcccagccccgccttctcttccagatcttcgggactggtcatagctccttggaatcaccaacaaacatgccttctccttctcctgattattttacatggaatctcacctggataatgaaagactccttccctttcctgtctcatcgcagccgatatggtctggagtgcagctttgacttcccctgtgagctggagtattcccctccactgcatgacctcaggaaccagagctggtcctggcgccgcatcccctccgaggaggcctcccagatggacttgctggatgggcctggggcagagcgttctaaggagatgcccagaggctcctttctccttctcaacacctcagctgactccaagcacaccatcctgagtccgtggatgaggagcagcagtgagcactgcacactggccgtctcggtgcacaggcacctgcagccctctggaaggtacattgcccagctgctgccccacaacgaggctgcaagagagatcctcctgatgcccactccagggaagcatggttggacagtgctccagggaagaatcgggcgtccagacaacccatttcgagtggccctggaatacatctccagtggaaaccgcagcttgtctgcagtggacttctttgccctgaagaactgcagtgaaggaacatccccaggctccaagatggccctgcagagctccttcacttgttggaatgggacagtcctccagcttgggcaggcctgtgacttccaccaggactgtgcccagggagaagatgagagccagatgtgccggaaactgcctgtgggtttttactgcaactttgaagatggcttctgtggctggacccaaggcacactgtcaccccacactcctcaatggcaggtcaggaccctaaaggatgcccggttccaggaccaccaagaccatgctctattgctcagtaccactgatgtccccgcttctgaaagtgctacagtgaccagtgctacgtttcctgcaccgatcaagagctctccatgtgagctccgaatgtcctggctcattcgtggagtcttgaggggaaacgtgtccttggtgctagtggagaacaaaaccgggaaggagcaaggcaggatggtctggcatgtcgccgcctatgaaggcttgagcctgtggcagtggatggtgttgcctctcctcgatgtgtctgacaggttctggctgcagatggtcgcatggtggggacaaggatccagagccatcgtggcttttgacaatatctccatcagcctggactgctacctcaccattagcggagaggacaagatcctgcagaatacagcacccaaatcaagaaacctgtttgagagaaacccaaacaaggagctgaaacccggggaaaattcaccaagacagacccccatctttgaccctacagttcattggctgttcaccacatgtggggccagcgggccccatggccccacccaggcacagtgcaacaacgcctaccagaactccaacctgagcgtggaggtggggagcgagggccccctgaaaggcatccagatctggaaggtgccagccaccgacacctacagcatctcgggctacggagctgctggcgggaaaggcgggaagaacaccatgatgcggtcccacggcgtgtctgtgctgggcatcttcaacctggagaaggatgacatgctgtacatcctggttgggcagcagggagaggacgcctgccccagtacaaaccagttaatccagaaagtctgcattggagagaacaatgtgatagaagaagaaatccgtgtgaacagaagcgtgcatgagtgggcaggaggcggaggaggagggggtggagccacctacgtatttaagatgaaggatggagtgccggtgcccctgatcattgcagccggaggtggtggcagggcctacggggccaagacagacacgttccacccagagagactggagaataactcctcggttctagggctaaacggcaattccggagccgcaggtggtggaggtggctggaatgataacacttccttgctctgggccggaaaatctttgcaggagggtgccaccggaggacattcctgcccccaggccatgaagaagtgggggtgggagacaagagggggtttcggagggggtggaggggggtgctcctcaggtggaggaggcggaggatatataggcggcaatgcagcctcaaacaatgaccccgaaatggatggggaagatggggtttccttcatcagtccactgggcatcctgtacaccccagctttaaaagtgatggaaggccacggggaagtgaatattaagcattatctaaactgcagtcactgtgaggtagacgaatgtcacatggaccctgaaagccacaaggtcatctgcttctgtgaccacgggacggtgctggctgaggatggcgtctcctgcattgtgtcacccaccccggagccacacctgccactctcgctgatcctctctgtggtgacctctgccctcgtggccgccctggtcctggctttctccggcatcatgattgtgtaccgccggaagcaccaggagctgcaagccatgcagatggagctgcagagccctgagtacaagctgagcaagctccgcacctcgaccatcatgaccgactacaaccccaactactgctttgctggcaagacctcctccatcagtgacctgaaggaggtgccgcggaaaaacatcaccctcattcggggtctgggccatggcgcctttggggaggtgtatgaaggccaggtgtccggaatgcccaacgacccaagccccctgcaagtggctgtgaagacgctgcctgaagtgtgctctgaacaggacgaactggatttcctcatggaagccctgatcatcagcaaattcaaccaccagaacattgttcgctgcattggggtgagcctgcaatccctgccccggttcatcctgctggagctcatggcggggggagacctcaagtccttcctccgagagacccgccctcgcccgagccagccctcctccctggccatgctggaccttctgcacgtggctcgggacattgcctgtggctgtcagtatttggaggaaaaccacttcatccaccgagacattgctgccagaaactgcctcttgacctgtccaggccctggaagagtggccaagattggagacttcgggatggcccgagacatctacagggcgagctactatagaaagggaggctgtgccatgctgccagttaagtggatgcccccagaggccttcatggaaggaatattcacttctaaaacagacacatggtcctttggagtgctgctatgggaaatcttttctcttggatatatgccataccccagcaaaagcaaccaggaagttctggagtttgtcaccagtggaggccggatggacccacccaagaactgccctgggcctgtataccggataatgactcagtgctggcaacatcagcctgaagacaggcccaactttgccatcattttggagaggattgaatactgcacccaggacccggatgtaatcaacaccgctttgccgatagaatatggtccacttgtggaagaggaagagaaagtgcctgtgaggcccaaggaccctgagggggttcctcctctcctggtctctcaacaggcaaaacgggaggaggagcgcagcccagctgccccaccacctctgcctaccacctcctctggcaaggctgcaaagaaacccacagctgcagagatctctgttcgagtccctagagggccggccgtggaagggggacacgtgaatatggcattctctcagtccaaccctccttcggagttgcacaaggtccacggatccagaaacaagcccaccagcttgtggaacccaacgtacggctcctggtttacagagaaacccaccaaaaagaataatcctatagcaaagaaggagccacacgacaggggtaacctggggctggagggaagctgtactgtcccacctaacgttgcaactgggagacttccgggggcctcactgctcctagagccctcttcgctgactgccaatatgaaggaggtacctctgttcaggctacgtcacttcccttgtgggaatgtcaattacggctaccagcaacagggcttgcccttagaagccgctactgcccctggagctggtcattacgaggataccattctgaaaagcaagaatagcatgaaccagcctgggccctgagctcggtcgcacactcacttctcttccttgggatccctaagaccgtggaggagagagaggcaatggctccttcacaaaccagagaccaaatgtcacgttttgttttgtgccaacctattttgaagtaccaccaaaaaagctgtattttgaaaatgctttagaaaggttttgagcatgggttcatcctattctttcgaaagaagaaaatatcataaaaatgagtgataaatacaaggcccagatgtggttgcataaggtttttatgcatgtttgttgtatacttccttatgcttctttcaaattgtgtgtgctctgcttcaatgtagtcagaattagctgcttctatgtttcatagttggggtcatagatgtttccttgccttgttgatgtggacatgagccatttgaggggagagggaacggaaataaaggagttatttgtaatgactaaaa

SEQ ID NO: 8 - protein, 1620 aa, Homo sapiens
MGAIGLLWLLPLLLSTAAVGSGMGTGQRAGSPAAGPPLQPREPLSYSRLQRKSLAVDFVVPSLFRVYARDLLLPPSSSELKAGRPEARGSLALDCAPLLRLLGPAPGVSWTAGSPAPAEARTLSRVLKGGSVRKLRRAKQLVLELGEEAILEGCVGPPGEAAVGLLQFNLSELFSWWIRQGEGRLRIRLMPEKKASEVGREGRLSAAIRASQPRLLFQIFGTGHSSLESPTNMPSPSPDYFTWNLTWIMKDSFPFLSHRSRYGLECSFDFPCELEYSPPLHDLRNQSWSWRRIPSEEASQMDLLDGPGAERSKEMPRGSFLLLNTSADSKHTILSPWMRSSSEHCTLAVSVHRHLQPSGRYIAQLLPHNEAAREILLMPTPGKHGWTVLQGRIGRPDNPFRVALEYISSGNRSLSAVDFFALKNCSEGTSPGSKMALQSSFTCWNGTVLQLGQACDFHQDCAQGEDESQMCRKLPVGFYCNFEDGFCGWTQGTLSPHTPQWQVRTLKDARFQDHQDHALLLSTTDVPASESATVTSATFPAPIKSSPCELRMSWLIRGVLRGNVSLVLVENKTGKEQGRMVWHVAAYEGLSLWQWMVLPLLDVSDRFWLQMVAWWGQGSRAIVAFDNISISLDCYLTISGEDKILQNTAPKSRNLFERNPNKELKPGENSPRQTPIFDPTVHWLFTTCGASGPHGPTQAQCNNAYQNSNLSVEVGSEGPLKGIQIWKVPATDTYSISGYGAAGGKGGKNTMMRSHGVSVLGIFNLEKDDMLYILVGQQGEDACPSTNQLIQKVCIGENNVIEEEIRVNRSVHEWAGGGGGGGGATYVFKMKDGVPVPLIIAAGGGGRAYGAKTDTFHPERLENNSSVLGLNGNSGAAGGGGGWNDNTSLLWAGKSLQEGATGGHSCPQAMKKWGWETRGGFGGGGGGCSSGGGGGGYIGGNAASNNDPEMDGEDGVSFISPLGILYTPALKVMEGHGEVNIKHYLNCSHCEVDECHMDPESHKVICFCDHGTVLAEDGVSCIVSPTPEPHLPLSLILSVVTSALVAALVLAFSGIMIVYRRKHQELQAMQMELQSPEYKLSKLRTSTIMTDYNPNYCFAGKTSSISDLKEVPRKNITLIRGLGHGAFGEVYEGQVSGMPNDPSPLQVAVKTLPEVCSEQDELDFLMEALIISKFNHQNIVRCIGVSLQSLPRFILLELMAGGDLKSFLRETRPRPSQPSSLAMLDLLHVARDIACGCQYLEENHFIHRDIAARNCLLTCPGPGRVAKIGDFGMARDIYRASYYRKGGCAMLPVKWMPPEAFMEGIFTSKTDTWSFGVLLWEIFSLGYMPYPSKSNQEVLEFVTSGGRMDPPKNCPGPVYRIMTQCWQHQPEDRPNFAIILERIEYCTQDPDVINTALPIEYGPLVEEEEKVPVRPKDPEGVPPLLVSQQAKREEERSPAAPPPLPTTSSGKAAKKPTAAEISVRVPRGPAVEGGHVNMAFSQSNPPSELHKVHGSRNKPTSLWNPTYGSWFTEKPTKKNNPIAKKEPHDRGNLGLEGSCTVPPNVATGRLPGASLLLEPSSLTANMKEVPLFRLRHFPCGNVNYGYQQQGLPLEAATAPGAGHYEDTILKSKNSMNQPGP

SEQ ID NO: 9 - DNA, 7109 bp, Homo sapiens
acagataaagactcaagtctggggacctcctggtcactcaggcagcagccccttctttcttgccccagtctccagttctccagtgttcacaggtgagcctaccaacagccactgctcatgatggaggccatcaagaaaaagatgcagatgctgaagttagacaaggagaatgctctggatcgggcagagcaagctgaagctgagcagaagcaggcagaagaaagaagtaaacagctggaggatgagctggcagccatgcagaagaagctgaaagggacagaggatgagctggacaagtattctgaagctttgaaggatgcccaggagaagctggaactggcagagaagaaggctgctgatgctgaggctgaggtggcctccttgaaccgtaggatccagctggttgaagaagagctggaccgtgctcaggagcgcctggccactgccctgcaaaagctggaagaagctgaaaaagctgctgatgagagtgagagaggtatgaaggttattgaaaaccgggccttaaaagatgaagaaaagatggaactccaggaaatccaactcaaagaagctaagcacattgcagaagaggcagataggaagtatgaagaggtggctcgtaagttggtgatcattgaaggagacttggaacgcacagaggaacgagctgagctggcagagtctaagtgttctgagctggaggaggagctgaagaatgtcaccaacaacctcaagtctcttgaggctcaggcggagaagtactctcaaaaagaagataaatatgaggaagaaatcaagattcttactgataaactcaaggaggcagagacccgtgctgagtttgctgagagatcggtagccaagctggaaaagacaattgatgacctggaagatgagctctatgcccagaaactgaagtacaaggccattagcgaggagctggaccacgccctcaatgacatgacctctatataattatcaccgtttctgctctgttctggatctgccccctttactcctcggggaacccaaggccccactctcgctctggattccatttgggtcagcctggctggtccccaaggcattaggatgggggagcaaaaagcaacttatgtattttcttccacccccaccccaaattaaaatgttaagctgctggaaacctcatgccaccctgcatttgtgtcattgacaaagctgttgctgtccctaagaaggagccttgggggtgtgatgtggggaagagctattgtaggctccccctcctctgacttatgtaatcaaagccacttttgtgtgtgtctattttttcttgacatttaaactcagctgatctgattctaccagagtgatggatttagtacaggttactcaggatagtaattttagttatactcctcaagctgaacaagattaaattccttatttccaggttcttaaatcatcctgcctgcagtgtttccattctctcttcaggtattcctcctttggtgtggtgtcattgagaagccattgaagtgactctcaatacacattctgtacccttttaccggtggttcaaatggtgcatcctcagaacacccagtgaacccaatacattattgctaagattgactaattatgtcaactccagtcacagaaaaatacacaatggatagaattctggacggtttttttactttttcttctttaaacctttcttacatatttgagacttgctaccatttgcctgctagtgtgtgactagtgggatataagataagtgataaattattattgggaaaactaaaatgaccaatcatgcatatttcaaataatgtgcatatgaggctaatgatttattacatacataaatttctgctagtaaaattttccttggttcatattgtggaattaaatatcaacattttagaaattcccattataggccgggcgtggtagctcacgcctataatcccagcactttgggaggctggggcaggtggatcacctgaggtcatgagttcgagaccagctcggccaacatggtgaaaccccgtctctactaaaaatacaaaaattagctgggcatggtgggtgggtgcctgtaatcccagctactcgggaggctgaggcaggagaatcgcttgcacctgggaggcggaggttgcagtgagcggagatcgcgccactgcattccagcctgggcaacagagagactccatctcaaaaaaaaaaaaggaattcgcattccaatttacacagcagagatttcttaatagtatagctgtgaattatactaatccaagcacgtaagtgttgttcacttagtactttagtttcccagcagggtatgtatttaaaatttgcttttcttttagctgggtgcaatggcacttgcctgtactgcctgtagcttcttgggaggctgaggcaggaggattgcttgagcccaggagttctgcactgtagtgtgctatgcaggtcagatgtcctcactaaatttggcatcagtatggtgacctcctgggagtggagaacaacaaggttgcctaagaaggggtgaactggcccaggtcggaaatggagcaggtcaaaattcctgtgctgatcagtagtgggattgcacctataaatagccactgtagtactccagcctgggcaacacagcaagattccatctgttaaaaacacttttgctcttcttttaaacagatataatcaggtagggaagttttccttaatctaaaactttaagtcatatcaaattcacgtttccttttgtccattccatttcttactgccgcatagcctttgagattaaggttcagattcatttattcagctgacacttcctggtatcttctaggtataggatattaagatggagacagaaataaagatggaggcaccattcctactctcaagttgcttagaatctactaggagagaaaacatacataaagctacagatactgtgtgatgaatgccacaaataatagtgttatgggaattgagtagaggggacgagattgatcctagtgggaatgaattggaaaaactcatggaagaaggcatgtaatgggtacttcataaacatgttaaaacttttttctttttttctttttttttttttttttgagacggagtttgactcttgtcacctaggctggagttcagtggcctgatctcagctcactgcaacctctgcctcctgggttcaagcagttctcccacctcagcctcccgagtagctgagatcacaggcgcctgccaccacacccagctaatttttgtattattagtagaggtgaggtttcaccatgttggccaggctggtctggaactcctgacctcaagtgatccacccacctcagcctcccaaagtgatgggattacaggcttgagccactgcgcccagccaacatgttaaacttgcatattcatttttattgggttccaaaagtggatttttgacaagcagagttgggttgtgggatagtgaatattgagcattccattatttatttatttttctctttttgagatggagtctcgctctgtcacccaggctggatggagtgcagtggtgagatcatggctcactgcaacctctgcttcttgagttcaagcgattctcctgtctcagcttcccgaggagctgtgattacagatacccaccaccatgcccagctgatttttgtatttttagtacggacggggtttcagcatgttggccaggctggtcgcgaactcctgacctcaagtgatccacccgcctctgcctcccaaagtgttgggattacaggcgtgagccactgcacctggcctgagcattccatttaaagagaaacaaaataataaaggcattgatagagatgagaaggccacaatagctctaaaggtagatttagacagagtagggaacaggttgtgtcttaaaatgaggctgaggagttataattttacttggagttaatggggatgccactggagattttgaataggatatgttgtgatctgaataacatataagaagaattaatttggtaactaatttgcagattagcaaagtgattcactaacatggtgtttctcacatttcagccatttatgttaccatttttgatggctttttccatattcattgctgcctacattgttttcttcagatctactcatttccagatttattttgttcttacttgacacaattctattttgaaatcaaagttttgatgtgttagtgttttttcctaatcacattaaagtaactatagcagtgaatacaccacactttggaaaaaattgggttaggttaatttagttttctaggagagaataatcagggtctgagctagagtagtggcaggagagatagcactaaataaagacaggcattgtgaaaggcctggccacttgatgtgaggaggaaagacaaggatgactggtttttagagtaggagaattagccgggtgcagtggctcatgcctgtaatccctgcactttaggaggctgaggtgagaggatttcttgaatccaggagttcgagaccagcctggcaataaagtgagaacctgtctctacaaaatataaaaacttagccaaacatggtggtgcgtgcctgcagtcctatctacttggagggccgaagccagaggatcctttgagcccaggagtctgaggctgcagcaagctgtgatcacactgctgcactccatcctgggtggcagaatgagaccccccccaaaaaaagagtaggaaagtggtggggttaaagatgtagggagatcatgttgtcctggtttggggagctgggggaagggaaagaagatacggctgacaatctggcaggtatctgggtgaaaacaaaattctagggcgtgaggcagagaggttgacataagagagttgggaatccatatggggtacaggtagtttatgccatggaggtaaattagaaccatgaaggacaattgcaaatacaaaaaaaagaggccaggcacggtggctcacgcctgtaatcccagcactttgggaggccgaggtgggcggatcacgaggtcaggagatcaagaccatcctggctgacacgttgaaaccccgtctctactaaaaatacaaaaaattagctgggcgtggttgcgggcacctgtagtcccaactacttgggaggctgaggcaggagaatggcgtgaacccgggaggcggagcttgtagtgagctgagattgtgccacggcattccagcctgggtgacagagcaagactctgtctcaaaaaaaaattaaacaatgaggaaaacgttatgtaagaggaggaaccaaatggaactgattggagggaaagaagacggttgagtagttctttaaaaagttccgggttggatgctttctagtggtttttcaacagagaggctaagaaggaagataactgaaaatgggacatgcattgatactttagtaatttgagggtacattttgagtgttaagaagtgaagaggaggagtcattttcaggggcaaaagagtgtattggtaggaagattatataggcaatataatttactttagagcagggctttccaacagaacttttggtaatgatgtctagtacattagccacatgtggcagtcaagcactcaaaacatggctagtgtggctgaggggctaaaatttaattgtatttcattgtagttcatttaaatttggctacctgtggctagtggctattatattggacaatgcatttctaaatattcagatcctgggcagaagttggctttgacatgaagaaagacttcttagaaaggaaggaagtagaccgggcatggtggctcatgcctgtaatcccaacactttgggaagccgaggcaggtggatcacaaggtcaagagatcaagaccatcctggccaacgtggtgaaaacctgtctctactaaaaatacaaaaattagctggacatggtggcacatgcctgtagtcccaactactcgagaggctgaggcaggagagaaaaaaaagaaggaaataagagggagattgggagaaaagtaaggtgttatagctctgatctgtggtatctcctgttttccttgcggtatgactagtgtgagccaaggatagagaccaacaaactggggtaccaaagtggacaatgaagtactatgtaattagtgctaatgctaaattcattcctttgtttaaggcttaatatccttgcagaagccatcctgtgttacttgagcctggactagtattggggtgaagtcaagcatcagagtaaaacatttgtccccttaatgttaccccctcttaatttctaagaaccacaggcccattttgcccttccttgttaccatcattgagataaggaataagatgtagtaaccccaagttatctgataggtacaactgacctattctgtttggcagctttatcttagacctattctgtttggcagctttatcttagccccaaccaaatctcttcctttcacatggtgttggttgaatactatccaactccatggggttggtttgtgtttttttttttttttttttttgagacggagtcttgctctgttgcccaggctggagtgcggtggtgtgatcttggctcactgcaagctccgcctcctgggtttaagtgatcctcctgcctcagcctcctgaatagctgggattacaggcacgtgcaaccaagcccggctaatttttgtgtttttagtagagactaggtttcaacatgttaggctgatctcaaactcctgacctcgtgatctgcccgcctcggccttccaaagtgctggggttacagacttgagccactgcacctggccatggggttgtttcttaattagatatagctgaaaagaacgctagaccaaataggttctctgccttgccttttcgtttgttttgttttagctattatcagggaaccaaaaactttaaggagctagtactggtcttaatttttaataactagagatagcagagttagaaactaagttcaaagtgagagaacagctgcatttgtctttctgacctcatgcaattcctaggaaactctgtgttctgtgatttagtcaggcaataaaatgctctcactccttaaaaaaaaaa

SEQ ID NO: 10 - protein, 285 aa, Homo sapiens
MMEAIKKKMQMLKLDKENALDRAEQAEAEQKQAEERSKQLEDELAAMQKKLKGTEDELDKYSEALKDAQEKLELAEKKAADAEAEVASLNRRIQLVEEELDRAQERLATALQKLEEAEKAADESERGMKVIENRALKDEEKMELQEIQLKEAKHIAEEADRKYEEVARKLVIIEGDLERTEERAELAESKCSELEEELKNVTNNLKSLEAQAEKYSQKEDKYEEEIKILTDKLKEAETRAEFAERSVAKLEKTIDDLEDELYAQKLKYKAISEELDHALNDMTSI

SEQ ID NO: 11 - DNA, 7368 bp, Homo sapiens
caagctttcaagcattcaaaggtctaaatgaaaaaggctaagtattatttcaaaaggcaagtatatcctaatatagcaaaacaaacaaagcaaaatccatcagctactcctccaattgaagtgatgaagcccaaataattcatatagcaaaatggagaaaattagaccggccatctaaaaatctgccattggtgaagtgatgaagaacatttactgtcttattccgaagcttgtcaattttgcaactcttggctgcctatggatttctgtggtgcagtgtacagttttaaatagctgcctaaagtcgtgtgtaactaatctgggccagcagcttgaccttggcacaccacataatctgagtgaaccgtgtatccaaggatgtcacttttggaactctgtagatcagaaaaactgtgctttaaagtgtcgggagtcgtgtgaggttggctgtagcagcgcggaaggtgcatatgaagaggaagtactggaaaatgcagacctaccaactgctccctttgcttcttccattggaagccacaatatgacattacgatggaaatctgcaaacttctctggagtaaaatacatcattcagtggaaatatgcacaacttctgggaagctggacttatactaagactgtgtccagaccgtcctatgtggtcaagcccctgcaccccttcactgagtacattttccgagtggtttggatcttcacagcgcagctgcagctctactcccctccaagtcccagttacaggactcatcctcatggagttcctgaaactgcacctttgattaggaatattgagagctcaagtcccgacactgtggaagtcagctgggatccacctcaattcccaggtggacctattttgggttataacttaaggctgatcagcaaaaatcaaaaattagatgcagggacacagagaaccagtttccagttttactccactttaccaaatactatctacaggttttctattgcagcagtaaatgaagttggtgagggtccagaagcagaatctagtattaccacttcatcttcagcagttcaacaagaggaacagtggctctttttatccagaaaaacttctctaagaaagagatctttaaaacatttagtagatgaagcacattgccttcggttggatgctatataccataatattacaggaatatctgttgatgtccaccagcaaattgtttatttctctgaaggaactctcatatgggcgaagaaggctgccaacatgtctgatgtatctgacctgagaattttttacagaggttcaggattaatttcttctatctccatagattggctttatcaaagaatgtatttcatcatggatgaactggtatgtgtctgtgatttagagaactgctcaaacatcgaggaaattactccaccctctattagtgcacctcaaaaaattgtggctgattcatacaatgggtatgtcttttacctcctgagagatggcatttatagagcagaccttcctgtaccatctggccggtgtgcagaagctgtgcgtattgtggagagttgcacgttaaaggactttgcaatcaagccacaagccaagcgaatcatttacttcaatgacactgcccaagtcttcatgtcaacatttctggatggctctgcttcccatctcatcctacctcgcatcccctttgctgatgtgaaaagttttgcttgtgaaaacaatgactttcttgtcacagatggcaaggtcattttccaacaggatgctttgtcttttaatgaattcatcgtgggatgtgacctgagtcacatagaagaatttgggtttggtaacttggtcatctttggctcatcctcccagctgcaccctctgccaggccgcccgcaggagctttcggtgctgtttggctctcaccaggctcttgttcaatggaagcctcctgcccttgccataggagccaatgtcatcctgatcagtgatattattgaactctttgaattaggcccttctgcctggcagaactggacctatgaggtgaaagtatccacccaagaccctcctgaagtcactcatattttcttgaacataagtggaaccatgctgaatgtacctgagctgcagagtgctatgaaatacaaggtttctgtgagagcaagttctccaaagaggccaggcccctggtcagagccctcagtgggtactaccctggtgccagctagtgaaccaccatttatcatggctgtgaaagaagatgggctttggagtaaaccattaaatagctttggcccaggagagttcttatcctctgatataggaaatgtgtcagacatggattggtataacaacagcctctactacagtgacacgaaaggcgacgtttttgtgtggctgctgaatgggacggatatctcagagaattatcacctacccagcattgcaggagcaggggctttagcttttgagtggctgggtcactttctctactgggctggaaagacatatgtgatacaaaggcagtctgtgttgacgggacacacagacattgttacccacgtgaagctattggtgaatgacatggtggtggattcagttggtggatatctctactggaccacactctattcagtggaaagcaccagactaaatggggaaagttcccttgtactacagacacagccttggttttctgggaaaaaggtaattgctctaactttagacctcagtgatgggctcctgtattggttggttcaagacagtcaatgtattcacctgtacacagctgttcttcggggacagagcactggggataccaccatcacagaatttgcagcctggagtacttctgaaatttcccagaatgcactgatgtactatagtggtcggctgttctggatcaatggctttaggattatcacaactcaagaaataggtcagaaaaccagtgtctctgttttggaaccagccagatttaatcagttcacaattattcagacatcccttaagcccctgccagggaacttttcctttacccctaaggttattccagattctgttcaagagtcttcatttaggattgaaggaaatgcttcaagttttcaaatcctgtggaatggtccccctgcggtagactggggtgtagttttctacagtgtagaatttagtgctcattctaagttcttggctagtgaacaacactctttacctgtatttactgtggaaggactggaaccttatgccttatttaatctttctgtcactccttatacctactggggaaagggccccaaaacatctctgtcacttcgagcacctgaaacagttccatcagcaccagagaaccccagaatatttatattaccaagtggaaaatgctgcaacaagaatgaagttgtggtggaatttaggtggaacaaacctaagcatgaaaatggggtgttaacaaaatttgaaattttctacaatatatccaatcaaagtattacaaacaaaacatgtgaagactggattgctgtcaatgtcactccctcagtgatgtcttttcaacttgaaggcatgagtcccagatgctttattgccttccaggttagggcctttacatctaaggggccaggaccatatgctgacgttgtaaagtctacaacatcagaaatcaacccatttcctcacctcataactcttcttggtaacaagatagtttttttagatatggatcaaaatcaagttgtgtggacgttttcagcagaaagagttatcagtgccgtttgctacacagctgataatgagatgggatattatgctgaaggggactcactctttcttctgcacttgcacaatcgctctagctctgagcttttccaagattcactggtttttgatatcacagttattacaattgactggatttcaaggcacctctactttgcactgaaagaatcacaaaatggaatgcaagtatttgatgttgatcttgaacacaaggtgaaatatcccagagaggtgaagattcacaataggaattcaacaataatttctttttctgtatatcctcttttaagtcgcttgtattggacagaagtttccaattttggctaccagatgttctactacagtattatcagtcacaccttgcaccgaattctgcaacccacagctacaaaccaacaaaacaaaaggaatcaatgttcttgtaatgtgactgaatttgagttaagtggagcaatggctattgatacctctaacctagagaaaccattgatatactttgccaaagcacaagagatctgggcaatggatctggaaggctgtcagtgttggagagttatcacagtacctgctatgctcgcaggaaaaacccttgttagcttaactgtggatggagatcttatatactggatcatcacagcaaaggacagcacacagatttatcaggcaaagaaaggaaatggggccatcgtttcccaggtgaaggccctaaggagtaggcatatcttggcttacagttcagttatgcagccttttccagataaagcgtttctgtctctagcttcagacactgtggaaccaactatacttaatgccactaacactagcctcacaatcagattacctctggccaagacaaacctcacatggtatggcatcaccagccctactccaacatacctggtttattatgcagaagttaatgacaggaaaaacagctctgacttgaaatatagaattctggaatttcaggacagtatagctcttattgaagatttacaaccattttcaacatacatgatacagatagctgtaaaaaattattattcagatcctttggaacatttaccaccaggaaaagagatttggggaaaaactaaaaatggagtaccagaggcagtgcagctcattaatacaactgtgcggtcagacaccagcctcattatatcttggagagaatctcacaagccaaatggacctaaagaatcagtccgttatcagttggcaatctcacacctggccctaattcctgaaactcctctaagacaaagtgaatttccaaatggaaggctcactctccttgttactagactgtctggtggaaatatttatgtgttaaaggttcttgcctgccactctgaggaaatgtggtgtacagagagtcatcctgtcactgtggaaatgtttaacacaccagagaaaccttattccttggttccagagaacactagtttgcaatttaattggaaggctccattgaatgttaacctcatcagattttgggttgagctacagaagtggaaatacaatgagttttaccatgttaaaacttcatgcagccaaggtcctgcttatgtctgtaatatcacaaatctacaaccttatacttcatataatgtcagagtagtggtggtttataagacgggagaaaatagcacctcacttccagaaagctttaagacaaaagctggagtcccaaataaaccaggcattcccaaattactagaagggagtaaaaattcaatacagtgggagaaagctgaagataatggatgtagaattacatactatatccttgagataagaaagagcacttcaaataatttacagaaccagaatttaaggtggaagatgacatttaatggatcctgcagtagtgtttgcacatggaagtccaaaaacctgaaaggaatatttcagttcagagtagtagctgcaaataatctagggtttggtgaatatagtggaatcagtgagaatattatattagttggagatgatttttggataccagaaacaagtttcatacttactattatagttggaatatttctggttgttacaatcccactgacctttgtctggcatagaagattaaagaatcaaaaaagtgccaaggaaggggtgacagtgcttataaacgaagacaaagagttggctgagctgcgaggtctggcagccggagtaggcctggctaatgcctgctatgcaatacatactcttccaacccaagaggagattgaaaatcttcctgccttccctcgggaaaaactgactctgcgtctcttgctgggaagtggagcctttggagaagtgtatgaaggaacagcagtggacatcttaggagttggaagtggagaaatcaaagtagcagtgaagactttgaagaagggttccacagaccaggagaagattgaattcctgaaggaggcacatctgatgagcaaatttaatcatcccaacattctgaagcagcttggagtttgtctgctgaatgaaccccaatacattatcctggaactgatggagggaggagaccttcttacttatttgcgtaaagcccggatggcaacgttttatggtcctttactcaccttggttgaccttgtagacctgtgtgtagatatttcaaaaggctgtgtctacttggaacggatgcatttcattcacagggatctggcagctagaaattgccttgtttccgtgaaagactataccagtccacggatagtgaagattggagactttggactcgccagagacatctataaaaatgattactatagaaagagaggggaaggcctgctcccagttcggtggatggctccagaaagtttgatggatggaatcttcactactcaatctgatgtatggtcttttggaattctgatttgggagattttaactcttggtcatcagccttatccagctcattccaaccttgatgtgttaaactatgtgcaaacaggagggagactggagccaccaagaaattgtcctgatgatctgtggaatttaatgacccagtgctgggctcaagaacccgaccaaagacctacttttcatagaattcaggaccaacttcagttattcagaaattttttcttaaatagcatttataagtccagagatgaagcaaacaacagtggagtcataaatgaaagctttgaaggtgaagatggcgatgtgatttgtttgaattcagatgacattatgccagttgctttaatggaaacgaagaaccgagaagggttaaactatatggtacttgctacagaatgtggccaaggtgaagaaaagtctgagggtcctctaggctcccaggaatctgaatcttgtggtctgaggaaagaagagaaggaaccacatgcagacaaagatttctgccaagaaaaacaagtggcttactgcccttctggcaagcctgaaggcctgaactatgcctgtctcactcacagtggatatggagatgggtctgattaatagcgttgtttgggaaatagagagttgagataaacactctcattcagtagttactgaaagaaaactctgctagaatgataaatgtcatggtggtctataactccaaataaacaatgcaacgttcc

SEQ ID NO: 12 - protein, 2347 aa, Homo sapiens
MKNIYCLIPKLVNFATLGCLWISVVQCTVLNSCLKSCVTNLGQQLDLGTPHNLSEPCIQGCHFWNSVDQKNCALKCRESCEVGCSSAEGAYEEEVLENADLPTAPFASSIGSHNMTLRWKSANFSGVKYIIQWKYAQLLGSWTYTKTVSRPSYVVKPLHPFTEYIFRVVWIFTAQLQLYSPPSPSYRTHPHGVPETAPLIRNIESSSPDTVEVSWDPPQFPGGPILGYNLRLISKNQKLDAGTQRTSFQFYSTLPNTIYRFSIAAVNEVGEGPEAESSITTSSSAVQQEEQWLFLSRKTSLRKRSLKHLVDEAHCLRLDAIYHNITGISVDVHQQIVYFSEGTLIWAKKAANMSDVSDLRIFYRGSGLISSISIDWLYQRMYFIMDELVCVCDLENCSNIEEITPPSISAPQKIVADSYNGYVFYLLRDGIYRADLPVPSGRCAEAVRIVESCTLKDFAIKPQAKRIIYFNDTAQVFMSTFLDGSASHLILPRIPFADVKSFACENNDFLVTDGKVIFQQDALSFNEFIVGCDLSHIEEFGFGNLVIFGSSSQLHPLPGRPQELSVLFGSHQALVQWKPPALAIGANVILISDIIELFELGPSAWQNWTYEVKVSTQDPPEVTHIFLNISGTMLNVPELQSAMKYKVSVRASSPKRPGPWSEPSVGTTLVPASEPPFIMAVKEDGLWSKPLNSFGPGEFLSSDIGNVSDMDWYNNSLYYSDTKGDVFVWLLNGTDISENYHLPSIAGAGALAFEWLGHFLYWAGKTYVIQRQSVLTGHTDIVTHVKLLVNDMVVDSVGGYLYWTTLYSVESTRLNGESSLVLQTQPWFSGKKVIALTLDLSDGLLYWLVQDSQCIHLYTAVLRGQSTGDTTITEFAAWSTSEISQNALMYYSGRLFWINGFRIITTQEIGQKTSVSVLEPARFNQFTIIQTSLKPLPGNFSFTPKVIPDSVQESSFRIEGNASSFQILWNGPPAVDWGVVFYSVEFSAHSKFLASEQHSLPVFTVEGLEPYALFNLSVTPYTYWGKGPKTSLSLRAPETVPSAPENPRIFILPSGKCCNKNEVVVEFRWNKPKHENGVLTKFEIFYNISNQSITNKTCEDWIAVNVTPSVMSFQLEGMSPRCFIAFQVRAFTSKGPGPYADVVKSTTSEINPFPHLITLLGNKIVFLDMDQNQVVWTFSAERVISAVCYTADNEMGYYAEGDSLFLLHLHNRSSSELFQDSLVFDITVITIDWISRHLYFALKESQNGMQVFDVDLEHKVKYPREVKIHNRNSTIISFSVYPLLSRLYWTEVSNFGYQMFYYSIISHTLHRILQPTATNQQNKRNQCSCNVTEFELSGAMAIDTSNLEKPLIYFAKAQEIWAMDLEGCQCWRVITVPAMLAGKTLVSLTVDGDLIYWIITAKDSTQIYQAKKGNGAIVSQVKALRSRHILAYSSVMQPFPDKAFLSLASDTVEPTILNATNTSLTIRLPLAKTNLTWYGITSPTPTYLVYYAEVNDRKNSSDLKYRILEFQDSIALIEDLQPFSTYMIQIAVKNYYSDPLEHLPPGKEIWGKTKNGVPEAVQLINTTVRSDTSLIISWRESHKPNGPKESVRYQLAISHLALIPETPLRQSEFPNGRLTLLVTRLSGGNIYVLKVLACHSEEMWCTESHPVTVEMFNTPEKPYSLVPENTSLQFNWKAPLNVNLIRFWVELQKWKYNEFYHVKTSCSQGPAYVCNITNLQPYTSYNVRVVVVYKTGENSTSLPESFKTKAGVPNKPGIPKLLEGSKNSIQWEKAEDNGCRITYYILEIRKSTSNNLQNQNLRWKMTFNGSCSSVCTWKSKNLKGIFQFRVVAANNLGFGEYSGISENIILVGDDFWIPETSFILTIIVGIFLVVTIPLTFVWHRRLKNQKSAKEGVTVLINEDKELAELRGLAAGVGLANACYAIHTLPTQEEIENLPAFPREKLTLRLLLGSGAFGEVYEGTAVDILGVGSGEIKVAVKTLKKGSTDQEKIEFLKEAHLMSKFNHPNILKQLGVCLLNEPQYIILELMEGGDLLTYLRKARMATFYGPLLTLVDLVDLCVDISKGCVYLERMHFIHRDLAARNCLVSVKDYTSPRIVKIGDFGLARDIYKNDYYRKRGEGLLPVRWMAPESLMDGIFTTQSDVWSFGILIWEILTLGHQPYPAHSNLDVLNYVQTGGRLEPPRNCPDDLWNLMTQCWAQEPDQRPTFHRIQDQLQLFRNFFLNSIYKSRDEANNSGVINESFEGEDGDVICLNSDDIMPVALMETKNREGLNYMVLATECGQGEEKSEGPLGSQESESCGLRKEEKEPHADKDFCQEKQVAYCPSGKPEGLNYACLTHSGYGDGSD

SEQ ID NO: 13 - DNA, 4881 bp, Homo sapiens
atgagtatgctaaagccaagtgggcttaaggcccccaccaagatcctgaagcctggaagcacagctctgaagacacctacggctgttgtagctccagtagaaaaaaccatatccagtgaaaaagcatcaagcactccatcatctgagactcaggaggaatttgtggatgactttcgagttggggagcgagtttgggtgaatggaaataagcctggatttatccagtttcttggagaaacccagtttgcaccaggccagtgggctggaattgttttagatgaacccataggcaagaacgatggttcggtggcaggagttcggtatttccagtgtgaacctttaaagggcatatttacccgaccttcaaagttaacaaggaaggtgcaagcagaagatgaagctaatggcctgcagacaacgcccgcctcccgagctacttcaccgctgtgcacttctacggccagcatggtgtcttcctccccctccaccccttcaaacatccctcagaaaccatcacagccagcagcaaaggaaccttcagctacgcctccgatcagcaaccttacaaaaactgccagtgaatctatctccaacctttcagaggctggctcaatcaagaaaggagaaagagagctcaaaatcggagacagagtattggttggtggcactaaggctggtgtagtccggtttcttggggagaccgactttgccaagggggagtggtgtggcgtggagttagatgagccacttgggaagaatgatggcgctgttgctggaacaaggtattttcagtgtcaacccaaatatggcttgttcgctcctgtccacaaagttaccaagattggcttcccttccactacaccagccaaagccaaggccaacgcagtgaggcgagtgatggcgaccacgtccgccagcctgaagcgcagcccttctgcctcttccctcagctccatgagctcagtggcctcctctgtgagcagcaggcccagtcggacaggactattgactgaaacctcctcccgttacgccaggaagatctccggtaccactgccctccaggaggccctgaaggagaagcagcagcacattgagcagctgctggcggaacgggatctggagagggcggaggtggccaaggccacgagccacgtgggggagatagagcaggagctagctctggcccgggacggacatgaccagcatgtcctggaattggaagccaaaatggaccagctgcgaacaatggtggaagctgctgacagggagaaggtggagcttctcaaccagcttgaagaggagaaaaggaaggttgaggaccttcagttccgggttgaagaagaatcaattaccaaaggtgatcttgagacgcagaccaaactggagcatgcccgcattaaggagcttgaacagagcctgctctttgaaaagaccaaagctgacaaactccagagggagttagaagacactagggtggctacagtttcagaaaagtcacgtataatggaactggagaaagacctagcattgagagtacaggaagtagctgagctccgaagaaggctagagtccaataagcctgctggggatgtggacatgtcactttcccttttgcaagagataagctctttgcaagaaaagttagaagtcacccgtactgaccaccagagagaaataacttctctgaaggagcattttggagcccgggaagaaactcatcagaaggagataaaggctctgtataccgccacggaaaagctttccaaagagaacgagtcattgaaaagcaagctggagcatgccaacaaagagaactcagatgtgatagctctatggaagtccaaactggagactgccatcgcatcccaccagcaggcgatggaagaactgaaggtatctttcagcaaagggcttggaacagagacggcagaatttgctgaactaaaaacacaaatagagaaaatgagactagattaccaacacgaaatagaaaatttgcagaatcaacaagactctgaacgggctgcccatgctaaagagatggaagccttgagggctaaactgatgaaagttattaaagaaaaggaaaacagtctggaagccatcaggtcgaaactggacaaagcagaagaccagcatctcgtagaaatggaagacacgttaaacaaattacaggaagctgaaataaaggtaaaggagctagaggtactgcaagccaaatgcaatgaacaaaccaaggttattgataattttacatcacagctcaaggctactgaagaaaagctcttggatcttgatgcacttcggaaagccagttccgaaggtaaatcggaaatgaagaaacttagacagcagcttgaggcagctgagaaacagattaaacatttagagattgaaaagaatgctgaaagtagcaaggctagtagcattaccagagagctccaggggagagagctaaagcttactaaccttcaggaaaatttgagtgaagtcagtcaagtgaaagagactttggaaaaagaacttcagattttgaaagaaaagtttgctgaagcttcagaggaggcagtctctgttcagagaagtatgcaagaaactgtaaataagttacaccaaaaggaggaacagtttaacatgctgtcttctgacttggagaagctgagagaaaacttagcagatatggaggcaaaatttagagagaaagatgagagagaagagcagctgataaaggcaaaggaaaaactggaaaatgacattgcagaaataatgaagatgtcaggagataactcttctcagctgacaaaaatgaacgatgaattacgtctgaaagaaagagatgtagaagaattacagctaaaacttacaaaggctaatgaaaatgcaagttttctgcaaaaaagtattgaggacatgactgtcaaagctgaacagagccagcaagaagcagctaaaaagcatgaggaagaaaagaaagaattggagaggaaattgtcggacctggaaaagaaaatggaaacaagccacaaccagtgtcaggagctgaaagccaggtatgagagagccacttctgagacaaaaaccaagcatgaagaaatcctacagaacctccagaagacgctgctggacacagaggacaagctgaagggcgcacgggaggagaacagtggcttgctgcaggagctggaggagctgagaaagcaagccgacaaagccaaagctgctcaaacagcggaagatgccatgcagataatggaacagatgaccaaagagaagactgagactctggcctccttggaggacaccaagcaaacaaatgcaaaactacagaatgaattggacacacttaaagaaaacaacttgaaaaatgtggaagagctgaacaaatcaaaagaactcctgactgtagagaatcaaaaaatggaagaatttaggaaagaaatagaaaccctaaagcaggcagcagctcagaagtcccagcagctttcagcgttgcaagaagagaacgttaaacttgctgaggagctggggagaagcagggacgaagtcacaagtcatcaaaagctggaagaagaaagatctgtgctcaataatcagttgttagaaatgaaaaaaagtactcttccaacccaagaggagattgaaaatcttcctgccttccctcgggaaaaactgactctgcgtctcttgctgggaagtggagcctttggagaagtgtatgaaggaacagcagtggacatcttaggagttggaagtggagaaatcaaagtagcagtgaagactttgaagaagggttccacagaccaggagaagattgaattcctgaaggaggcacatctgatgagcaaatttaatcatcccaacattctgaagcagcttggagtttgtctgctgaatgaaccccaatacattatcctggaactgatggagggaggagaccttcttacttatttgcgtaaagcccggatggcaacgttttatggtcctttactcaccttggttgaccttgtagacctgtgtgtagatatttcaaaaggctgtgtctacttggaacggatgcatttcattcacagggatctggcagctagaaattgccttgtttccgtgaaagactataccagtccacggatagtgaagattggagactttggactcgccagagacatctataaaaatgattactatagaaagagaggggaaggcctgctcccagttcggtggatggctccagaaagtttgatggatggaatcttcactactcaatctgatgtatggtcttttggaattctgatttgggagattttaactcttggtcatcagccttatccagctcattccaaccttgatgtgttaaactatgtgcaaacaggagggagactggagccaccaagaaattgtcctgatgatctgtggaatttaatgacccagtgctgggctcaagaacccgaccaaagacctacttttcatagaattcaggaccaacttcagttattcagaaattttttcttaaatagcatttataagtccagagatgaagcaaacaacagtggagtcataaatgaaagctttgaaggtgaagatggcgatgtgatttgtttgaattcagatgacattatgccagttgctttaatggaaacgaagaaccgagaagggttaaactatatggtacttgctacagaatgtggccaaggtgaagaaaagtctgagggtcctctaggctcccaggaatctgaatcttgtggtctgaggaaagaagagaaggaaccacatgcagacaaagatttctgccaagaaaaacaagtggcttactgcccttctggcaagcctgaaggcctgaactatgcctgtctcactcacagtggatatggagatgggtctgattaa

SEQ ID NO: 14 - protein, 1626 aa, Homo sapiens
MSMLKPSGLKAPTKILKPGSTALKTPTAVVAPVEKTISSEKASSTPSSETQEEFVDDFRVGERVWVNGNKPGFIQFLGETQFAPGQWAGIVLDEPIGKNDGSVAGVRYFQCEPLKGIFTRPSKLTRKVQAEDEANGLQTTPASRATSPLCTSTASMVSSSPSTPSNIPQKPSQPAAKEPSATPPISNLTKTASESISNLSEAGSIKKGERELKIGDRVLVGGTKAGVVRFLGETDFAKGEWCGVELDEPLGKNDGAVAGTRYFQCQPKYGLFAPVHKVTKIGFPSTTPAKAKANAVRRVMATTSASLKRSPSASSLSSMSSVASSVSSRPSRTGLLTETSSRYARKISGTTALQEALKEKQQHIEQLLAERDLERAEVAKATSHVGEIEQELALARDGHDQHVLELEAKMDQLRTMVEAADREKVELLNQLEEEKRKVEDLQFRVEEESITKGDLETQTKLEHARIKELEQSLLFEKTKADKLQRELEDTRVATVSEKSRIMELEKDLALRVQEVAELRRRLESNKPAGDVDMSLSLLQEISSLQEKLEVTRTDHQREITSLKEHFGAREETHQKEIKALYTATEKLSKENESLKSKLEHANKENSDVIALWKSKLETAIASHQQAMEELKVSFSKGLGTETAEFAELKTQIEKMRLDYQHEIENLQNQQDSERAAHAKEMEALRAKLMKVIKEKENSLEAIRSKLDKAEDQHLVEMEDTLNKLQEAEIKVKELEVLQAKCNEQTKVIDNFTSQLKATEEKLLDLDALRKASSEGKSEMKKLRQQLEAAEKQIKHLEIEKNAESSKASSITRELQGRELKLTNLQENLSEVSQVKETLEKELQILKEKFAEASEEAVSVQRSMQETVNKLHQKEEQFNMLSSDLEKLRENLADMEAKFREKDEREEQLIKAKEKLENDIAEIMKMSGDNSSQLTKMNDELRLKERDVEELQLKLTKANENASFLQKSIEDMTVKAEQSQQEAAKKHEEEKKELERKLSDLEKKMETSHNQCQELKARYERATSETKTKHEEILQNLQKTLLDTEDKLKGAREENSGLLQELEELRKQADKAKAAQTAEDAMQIMEQMTKEKTETLASLEDTKQTNAKLQNELDTLKENNLKNVEELNKSKELLTVENQKMEEFRKEIETLKQAAAQKSQQLSALQEENVKLAEELGRSRDEVTSHQKLEEERSVLNNQLLEMKKSTLPTQEEIENLPAFPREKLTLRLLLGSGAFGEVYEGTAVDILGVGSGEIKVAVKTLKKGSTDQEKIEFLKEAHLMSKFNHPNILKQLGVCLLNEPQYIILELMEGGDLLTYLRKARMATFYGPLLTLVDLVDLCVDISKGCVYLERMHFIHRDLAARNCLVSVKDYTSPRIVKIGDFGLARDIYKNDYYRKRGEGLLPVRWMAPESLMDGIFTTQSDVWSFGILIWEILTLGHQPYPAHSNLDVLNYVQTGGRLEPPRNCPDDLWNLMTQCWAQEPDQRPTFHRIQDQLQLFRNFFLNSIYKSRDEANNSGVINESFEGEDGDVICLNSDDIMPVALMETKNREGLNYMVLATECGQGEEKSEGPLGSQESESCGLRKEEKEPHADKDFCQEKQVAYCPSGKPEGLNYACLTHSGYGDGSD

SEQ ID NO: 15 - DNA, 5898 bp, Homo sapiens
gctgctgctgcagtgggacaggtggcggcgaccggcggcgtccgaggagatttaatccagagactgacttcactatagaacccacagttgtatcaatggttggggaaagatagtggcaacaggcaaaggagaaacagctctgacatacaaagaaaatgagtatgctaaagccaagtgggcttaaggcccccaccaagatcctgaagcctggaagcacagctctgaagacacctacggctgttgtagctccagtagaaaaaaccatatccagtgaaaaagcatcaagcactccatcatctgagactcaggaggaatttgtggatgactttcgagttggggagcgagtttgggtgaatggaaataagcctggatttatccagtttcttggagaaacccagtttgcaccaggccagtgggctggaattgttttagatgaacccataggcaagaacgatggttcggtggcaggagttcggtatttccagtgtgaacctttaaagggcatatttacccgaccttcaaagttaacaaggaaggtgcaagcagaagatgaagctaatggcctgcagacaacgcccgcctcccgagctacttcaccgctgtgcacttctacggccagcatggtgtcttcctccccctccaccccttcaaacatccctcagaaaccatcacagccagcagcaaaggaaccttcagctacgcctccgatcagcaaccttacaaaaactgccagtgaatctatctccaacctttcagaggctggctcaatcaagaaaggagaaagagagctcaaaatcggagacagagtattggttggtggcactaaggctggtgtagtccggtttcttggggagaccgactttgccaagggggagtggtgtggcgtggagttagatgagccacttgggaagaatgatggcgctgttgctggaacaaggtattttcagtgtcaacccaaatatggcttgttcgctcctgtccacaaagttaccaagattggcttcccttccactacaccagccaaagccaaggccaacgcagtgaggcgagtgatggcgaccacgtccgccagcctgaagcgcagcccttctgcctcttccctcagctccatgagctcagtggcctcctctgtgagcagcaggcccagtcggacaggactattgactgaaacctcctcccgttacgccaggaagatctccggtaccactgccctccaggaggccctgaaggagaagcagcagcacattgagcagctgctggcggaacgggatctggagagggcggaggtggccaaggccacgagccacgtgggggagatagagcaggagctagctctggcccgggacggacatgaccagcatgtcctggaattggaagccaaaatggaccagctgcgaacaatggtggaagctgctgacagggagaaggtggagcttctcaaccagcttgaagaggagaaaaggaaggttgaggaccttcagttccgggttgaagaagaatcaattaccaaaggtgatcttgagacgcagaccaaactggagcatgcccgcattaaggagcttgaacagagcctgctctttgaaaagaccaaagctgacaaactccagagggagttagaagacactagggtggctacagtttcagaaaagtcacgtataatggaactggagaaagacctagcattgagagtacaggaagtagctgagctccgaagaaggctagagtccaataagcctgctggggatgtggacatgtcactttcccttttgcaagagataagctctttgcaagaaaagttagaagtcacccgtactgaccaccagagagaaataacttctctgaaggagcattttggagcccgggaagaaactcatcagaaggagataaaggctctgtataccgccacggaaaagctttccaaagagaacgagtcattgaaaagcaagctggagcatgccaacaaagagaactcagatgtgatagctctatggaagtccaaactggagactgccatcgcatcccaccagcaggcgatggaagaactgaaggtatctttcagcaaagggcttggaacagagacggcagaatttgctgaactaaaaacacaaatagagaaaatgagactagattaccaacacgaaatagaaaatttgcagaatcaacaagactctgaacgggctgcccatgctaaagagatggaagccttgagggctaaactgatgaaagttattaaagaaaaggaaaacagtctggaagccatcaggtcgaaactggacaaagcagaagaccagcatctcgtagaaatggaagacacgttaaacaaattacaggaagctgaaataaaggtaaaggagctagaggtactgcaagccaaatgcaatgaacaaaccaaggttattgataattttacatcacagctcaaggctactgaagaaaagctcttggatcttgatgcacttcggaaagccagttccgaaggtaaatcggaaatgaagaaacttagacagcagcttgaggcagctgagaaacagattaaacatttagagattgaaaagaatgctgaaagtagcaaggctagtagcattaccagagagctccaggggagagagctaaagcttactaaccttcaggaaaatttgagtgaagtcagtcaagtgaaagagactttggaaaaagaacttcagattttgaaagaaaagtttgctgaagcttcagaggaggcagtctctgttcagagaagtatgcaagaaactgtaaataagttacaccaaaaggaggaacagtttaacatgctgtcttctgacttggagaagctgagagaaaacttagcagatatggaggcaaaatttagagagaaagatgagagagaagagcagctgataaaggcaaaggaaaaactggaaaatgacattgcagaaataatgaagatgtcaggagataactcttctcagctgacaaaaatgaacgatgaattacgtctgaaagaaagagatgtagaagaattacagctaaaacttacaaaggctaatgaaaatgcaagttttctgcaaaaaagtattgaggacatgactgtcaaagctgaacagagccagcaagaagcagctaaaaagcatgaggaagaaaagaaagaattggagaggaaattgtcggacctggaaaagaaaatggaaacaagccacaaccagtgtcaggagctgaaagccaggtatgagagagccacttctgagacaaaaaccaagcatgaagaaatcctacagaacctccagaagacgctgctggacacagaggacaagctgaagggcgcacgggaggagaacagtggcttgctgcaggagctggaggagctgagaaagcaagccgacaaagccaaagctgctcaaacagcggaagatgccatgcagataatggaacagatgaccaaagagaagactgagactctggcctccttggaggacaccaagcaaacaaatgcaaaactacagaatgaattggacacacttaaagaaaacaacttgaaaaatgtggaagagctgaacaaatcaaaagaactcctgactgtagagaatcaaaaaatggaagaatttaggaaagaaatagaaaccctaaagcaggcagcagctcagaagtcccagcagctttcagcgttgcaagaagagaacgttaaacttgctgaggagctggggagaagcagggacgaagtcacaagtcatcaaaagctggaagaagaaagatctgtgctcaataatcagttgttagaaatgaaaaaaagagaatccaagttcataaaagacgcagatgaagagaaagcttccttgcagaaatccatcagtataactagtgccttactcacagaaaaggatgccgagctggagaaactgagaaatgaggtcacagtgctcaggggagaaaacgcctctgccaagtccttgcattcagttgttcagactctagagtctgataaggtgaagctcgagctcaaggtaaagaacttggagcttcaactcaaagaaaacaagaggcagctcagcagctcctcaggtaatacagacactcaggcagacgaggatgaaagagcccaggagagtcagattgatttcctaaattcagtaatagtggaccttcaaaggaagaatcaagacctcaagatgaaggtggagatgatgtcagaagcagccctgaatgggaacggggatgacctaaacaattatgacagtgatgatcaggagaaacagtccaagaagaaacctcgcctcttctgtgacatttgtgactgctttgatctccacgacacagaggattgtcctacccaggcacagatgtcagaggaccctccccattccacacaccatggcagtcggggtgaggaacgcccatactgtgaaatctgtgagatgtttggacactgggccaccaactgcaatgacgacgaaaccttctgatgaagcctccagtggagaactgggcttgctcagacgcactcgcattgacacaacgtaacaccagcattgtgtgtgcagacttcaggagaactcatgttattttttaaccccgtcaacaaatctaggaaaatattttgatcttcaacaaattgccctttagtctccccgtatgagttagaataataaatatttagtaggtgagttttcacctcgaattttgttttcttgatttttacgtttgaagacattgcaccagatgccattacatttattggccccccgaccttgtagaaaaacccctaccctcacaataccttatttaagtaactttaaattatgccgttacttttcatatttgcactaagatatttccaggctgcatttgtatatttagattttttggttaagctttgacactggaatgagttgaaaaaatgtgccattttgcattttcatctactcatttaaagtattttattcttattcaaagaaatatctgagctctttgcactacctgttatcagtagtgcctttacttcaggcttgataatacttaggtgtgattataaaatcatgaagcaggtaaagggaggggcaagcccccaaactgctgtggggacattttataatctatatgctgcacccacttaatctactgtggtgttttgtttattagttttgcataatttcagcttctatatattgtatgtatatattttttaaaaatctatattttgggaaaaaaacatacacaatgtgtctttctttttggacatttacctttttgaaaaagaaaacacttaaaatgatcattaggacataacagactaggccagacatagcatcttgtggctttgcaaccattttcatttgtttgttttccttttatttcttcaccagatttaaataactggaggaattttctccaatttttttttccttctctggcaggtatccccagcagtcaattaacaataagccagtataaaacacctaaataaccaatctacaatctcccttcacaagtttttttactgtttttagatgaatgtacgatgagaaattcaacgttaataattctggattttcttatcacaaaaaagaaaatgaaggacctcaaagcacctgaacagtttatcgaccagtttgaatctatttatcttcatttgaatgtcttctagaatatgtaaaaagtcataaaatgtatcttccatgctacatgtacaataagaacttctataattgtatatatgcctttgatgtattttcccctcaagattatcaactgtgtgttcgacagtgaatattcaatctggtaccagttgaaatttttggttataaatgtaatacgaattgtttcacaaacagaaaacatgtaaagcagtattaaaatttggccaaacaagtgttctgtatctactttaataaatggttattctttaaaaaaaaaaaaaaaaaa

SEQ ID NO: 16 - protein, 1427 aa, Homo sapiens
MSMLKPSGLKAPTKILKPGSTALKTPTAVVAPVEKTISSEKASSTPSSETQEEFVDDFRVGERVWVNGNKPGFIQFLGETQFAPGQWAGIVLDEPIGKNDGSVAGVRYFQCEPLKGIFTRPSKLTRKVQAEDEANGLQTTPASRATSPLCTSTASMVSSSPSTPSNIPQKPSQPAAKEPSATPPISNLTKTASESISNLSEAGSIKKGERELKIGDRVLVGGTKAGVVRFLGETDFAKGEWCGVELDEPLGKNDGAVAGTRYFQCQPKYGLFAPVHKVTKIGFPSTTPAKAKANAVRRVMATTSASLKRSPSASSLSSMSSVASSVSSRPSRTGLLTETSSRYARKISGTTALQEALKEKQQHIEQLLAERDLERAEVAKATSHVGEIEQELALARDGHDQHVLELEAKMDQLRTMVEAADREKVELLNQLEEEKRKVEDLQFRVEEESITKGDLETQTKLEHARIKELEQSLLFEKTKADKLQRELEDTRVATVSEKSRIMELEKDLALRVQEVAELRRRLESNKPAGDVDMSLSLLQEISSLQEKLEVTRTDHQREITSLKEHFGAREETHQKEIKALYTATEKLSKENESLKSKLEHANKENSDVIALWKSKLETAIASHQQAMEELKVSFSKGLGTETAEFAELKTQIEKMRLDYQHEIENLQNQQDSERAAHAKEMEALRAKLMKVIKEKENSLEAIRSKLDKAEDQHLVEMEDTLNKLQEAEIKVKELEVLQAKCNEQTKVIDNFTSQLKATEEKLLDLDALRKASSEGKSEMKKLRQQLEAAEKQIKHLEIEKNAESSKASSITRELQGRELKLTNLQENLSEVSQVKETLEKELQILKEKFAEASEEAVSVQRSMQETVNKLHQKEEQFNMLSSDLEKLRENLADMEAKFREKDEREEQLIKAKEKLENDIAEIMKMSGDNSSQLTKMNDELRLKERDVEELQLKLTKANENASFLQKSIEDMTVKAEQSQQEAAKKHEEEKKELERKLSDLEKKMETSHNQCQELKARYERATSETKTKHEEILQNLQKTLLDTEDKLKGAREENSGLLQELEELRKQADKAKAAQTAEDAMQIMEQMTKEKTETLASLEDTKQTNAKLQNELDTLKENNLKNVEELNKSKELLTVENQKMEEFRKEIETLKQAAAQKSQQLSALQEENVKLAEELGRSRDEVTSHQKLEEERSVLNNQLLEMKKRESKFIKDADEEKASLQKSISITSALLTEKDAELEKLRNEVTVLRGENASAKSLHSVVQTLESDKVKLELKVKNLELQLKENKRQLSSSSGNTDTQADEDERAQESQIDFLNSVIVDLQRKNQDLKMKVEMMSEAALNGNGDDLNNYDSDDQEKQSKKKPRLFCDICDCFDLHDTEDCPTQAQMSEDPPHSTHHGSRGEERPYCEICEMFGHWATNCNDDETF

SEQ ID NO: 17 - DNA, 2214 bp, Homo sapiens
atgatgagtgatgcaagtgacatgttggctgcagcgttggagcagatggatggtatcatagcaggttctaaggctctggaatattccaatgggatttttgattgccaatctcccacctctccattcatgggaagtttgcgagctctgcaccttgtggaagacctgcgtggattgttagagatgatggaaacagatgagaaagaaggcttgagatgccagatcccagattcaacagcagaaacgcttgttgaatggcttcagagtcaaatgacaaatggacacctaccagggaacggagatgtgtatcaagaaaggctggcacgtttagaaaatgataaagaatccctcgttcttcaggtaagtgtgttaacagaccaggtggaggctcagggagagaagattcgagatttggagttttgtcttgaagagcacagagagaagttgaatgccacagaagaaatgctgcagcaggagcttctaagtaggacatccttagaaactcagaagttggatctgatggctgaaatatctaacttgaagttgaaactgacagctgtagagaaggacagattggattatgaagataagttcagagacacagaggggctgattcaggagatcaatgatttgaggttaaaagttagtgaaatggacagtgagagacttcagtatgaaaaaaagcttaaatcaaccaaagatgaactggcatctttaaaagaacaactagaagaaaaggaatctgaagtaaaaaggctacaagaaaaattggtttgcaagatgaaaggagaaggggttgaaattgttgatagagtctggcatagaagattaaagaatcaaaaaagtgccaaggaaggggtgacagtgcttataaacgaagacaaagagttggctgagctgcgaggtctggcagccggagtaggcctggctaatgcctgctatgcaatacatactcttccaacccaagaggagattgaaaatcttcctgccttccctcgggaaaaactgactctgcgtctcttgctgggaagtggagcctttggagaagtgtatgaaggaacagcagtggacatcttaggagttggaagtggagaaatcaaagtagcagtgaagactttgaagaagggttccacagaccaggagaagattgaattcctgaaggaggcacatctgatgagcaaatttaatcatcccaacattctgaagcagcttggagtttgtctgctgaatgaaccccaatacattatcctggaactgatggagggaggagaccttcttacttatttgcgtaaagcccggatggcaacgttttatggtcctttactcaccttggttgaccttgtagacctgtgtgtagatatttcaaaaggctgtgtctacttggaacggatgcatttcattcacagggatctggcagctagaaattgccttgtttccgtgaaagactataccagtccacggatagtgaagattggagactttggactcgccagagacatctataaaaatgattactatagaaagagaggggaaggcctgctcccagttcggtggatggctccagaaagtttgatggatggaatcttcactactcaatctgatgtatggtcttttggaattctgatttgggagattttaactcttggtcatcagccttatccagctcattccaaccttgatgtgttaaactatgtgcaaacaggagggagactggagccaccaagaaattgtcctgatgatctgtggaatttaatgacccagtgctgggctcaagaacccgaccaaagacctacttttcatagaattcaggaccaacttcagttattcagaaattttttcttaaatagcatttataagtccagagatgaagcaaacaacagtggagtcataaatgaaagctttgaaggtgaagatggcgatgtgatttgtttgaattcagatgacattatgccagttgctttaatggaaacgaagaaccgagaagggttaaactatatggtacttgctacagaatgtggccaaggtgaagaaaagtctgagggtcctctaggctcccaggaatctgaatcttgtggtctgaggaaagaagagaaggaaccacatgcagacaaagatttctgccaagaaaaacaagtggcttactgcccttctggcaagcctgaaggcctgaactatgcctgtctcactcacagtggatatggagatgggtctgattaa

SEQ ID NO: 18 - protein, 737 aa, Homo sapiens
MMSDASDMLAAALEQMDGIIAGSKALEYSNGIFDCQSPTSPFMGSLRALHLVEDLRGLLEMMETDEKEGLRCQIPDSTAETLVEWLQSQMTNGHLPGNGDVYQERLARLENDKESLVLQVSVLTDQVEAQGEKIRDLEFCLEEHREKLNATEEMLQQELLSRTSLETQKLDLMAEISNLKLKLTAVEKDRLDYEDKFRDTEGLIQEINDLRLKVSEMDSERLQYEKKLKSTKDELASLKEQLEEKESEVKRLQEKLVCKMKGEGVEIVDRVWHRRLKNQKSAKEGVTVLINEDKELAELRGLAAGVGLANACYAIHTLPTQEEIENLPAFPREKLTLRLLLGSGAFGEVYEGTAVDILGVGSGEIKVAVKTLKKGSTDQEKIEFLKEAHLMSKFNHPNILKQLGVCLLNEPQYIILELMEGGDLLTYLRKARMATFYGPLLTLVDLVDLCVDISKGCVYLERMHFIHRDLAARNCLVSVKDYTSPRIVKIGDFGLARDIYKNDYYRKRGEGLLPVRWMAPESLMDGIFTTQSDVWSFGILIWEILTLGHQPYPAHSNLDVLNYVQTGGRLEPPRNCPDDLWNLMTQCWAQEPDQRPTFHRIQDQLQLFRNFFLNSIYKSRDEANNSGVINESFEGEDGDVICLNSDDIMPVALMETKNREGLNYMVLATECGQGEEKSEGPLGSQESESCGLRKEEKEPHADKDFCQEKQVAYCPSGKPEGLNYACLTHSGYGDGSD

SEQ ID NO: 19 - DNA, 6094 bp, Homo sapiens
gattcctgcagggagggaggagagaagggcggcagtgggagggggaggtacctggaactgggagtgatgtcagctcccagctcggtgcctgcccggattcctgacatggtgtagtgcaggcagggtggggaaaggacggggaaggactcgtgtgctgcgagctggcggccgggccggagtgctggggctttgaactccgagaggaggtggaccagaacttttggaactagtgccggcggctctccaccccccagtataaaagaacgtgtggatcactttgctgagtacatccaagatttgaagaactgaaataaatcagctttaaacctgctttttaaaaatatctgggttggaatttgcccctgacaaataataaaatgatgagtgatgcaagtgacatgttggctgcagcgttggagcagatggatggtatcatagcaggttctaaggctctggaatattccaatgggatttttgattgccaatctcccacctctccattcatgggaagtttgcgagctctgcaccttgtggaagacctgcgtggattgttagagatgatggaaacagatgagaaagaaggcttgagatgccagatcccagattcaacagcagaaacgcttgttgaatggcttcagagtcaaatgacaaatggacacctaccagggaacggagatgtgtatcaagaaaggctggcacgtttagaaaatgataaagaatccctcgttcttcaggtaagtgtgttaacagaccaggtggaggctcagggagagaagattcgagatttggagttttgtcttgaagagcacagagagaagttgaatgccacagaagaaatgctgcagcaggagcttctaagtaggacatccttagaaactcagaagttggatctgatggctgaaatatctaacttgaagttgaaactgacagctgtagagaaggacagattggattatgaagataagttcagagacacagaggggctgattcaggagatcaatgatttgaggttaaaagttagtgaaatggacagtgagagacttcagtatgaaaaaaagcttaaatcaaccaaagatgaactggcatctttaaaagaacaactagaagaaaaggaatctgaagtaaaaaggctacaagaaaaattggtttgcaagatgaaaggagaaggggttgaaattgttgatagagatgaaaattttaaaaagaagctcaaagaaaaaaacatcgaagtacaaaaaatgaaaaaagctgtggagtccttgatggcagcaaatgaagaaaaggatcggaaaatagaagatcttcgacagtgcctgaacaggtacaagaaaatgcaagacacggtggtactggcccaaggtaaaaaaggcaaagatggagaatatgaagagctgctcaattccagttccatctcctctttgctggatgcacagggtttcagtgatctggagaaaagtccatcacccactccagtaatgggatctcccagttgtgacccatttaacacaagtgttcccgaagagttccatactaccatcttgcaagtttccatcccttcattattgccagcaactgtaagcatggaaacttctgaaaaatcaaagttgactcctaagccagagacttcatttgaagaaaatgatggaaacataatccttggtgccactgttgatacccaactgtgtgataaacttttaacttcaagtctgcagaagtccagcagcctgggcaatctgaagaaagagacatctgatggggaaaaggaaactattcagaagacttcagaggacagagctccggcagaaagcaggccatttgggacccttcctcccaggcccccagggcaggacacctccatggatgacaaccccttcggcactcgaaaagtcagatcttcctttggccggggcttttttaaaatcaaaagtaacaagagaacagcaagtgcaccaaacttagatcgtaaacgaagtgccagtgcacccaccctagctgaaacagaaaaagagacagcagagcacctagatctggctggtgcttcttctcggccaaaagattcacagaggaacagtcccttccagataccgcctccatctccagattccaaaaagaaatccagaggtatcatgaaactctttggaaaacttaggagaagtcaatcaactacattcaacccagatgacatgtctgagcctgaattcaaaagaggagggacaagggcaaccgcggggccccgattaggttggtctcgagacttgggacagtctaacagtgacttggatatgccatttgccaagtggaccaaggagcaggtttgcaattggctgatggaacagggcttgggctcgtacctgaattctggcaagcactggattgcatctggccaaacgcttttgcaggcttctcaacaagatctagagaaggaacttggaatcaagcattcacttcatcgaaagaaactccagctagcactccaagccctgggatctgaagaagaaaccaatcatgggaagctggatttcaactgggtcactagatggttggatgacattggcctccctcaatataagacccagtttgatgaaggacgggttgatggtcgaatgctacattacatgactgttgatgacttactgtctctgaaggttgtaagtgtgctacaccatctcagtatcaaaagggccatccaggtcctgaggatcaataactttgaaccaaactgtctacggaggcggccatctgatgagaataccatcgccccatcagaagttcagaagtggactaaccatcgagtgatggagtggctgcgctccgtggacttggcagaatatgcgcccaatctcagaggcagtggtgtccatggtgggctcatggttctagagcctcgttttaacgtagaaacaatggctcagttattgaacatcccacccaataagactttgctgcgaagacatttggccactcatttcaaccttctgattggggctgaggcacagcaccagaagcgagatgccatggagctgccggattatgtacttctaacagctactgccaaagtgaagccaaagaaacttgcctttagcaattttgggaatttgagaaagaagaaacaggaagatggtgaagaatatgtttgtccaatggaattgggacaggcatcaggaagtgcatctaagaaaggatttaaacctggtttggatatgcgcctgtatgaggaagatgatttggaccggttagagcagatggaagattcagaagggacagtgagacagataggtgcattctctgaaggcatcaacaatctgacgcacatgttaaaagaagatgacatgtttaaagattttgctgcccgttcccccagtgccagcattacagatgaagactcaaacgtttgaccgtagcacctggatgaacattaggagtgcttagtcttttttctacttgcttttccaaacactcacagtatatacaacaggcagcggattgtctattgtttgttgttccaacttctgctgtcgagaagtttaaacagaaagcaggagtaatgtgccgattctgaagttgccacaaaaaataagacactggtgaatgagagtataattgtttttcttctatttaatgtaaaaatctgtgatatattatatttaaagtgttgcatttaagatgagtattttaccagagtgtttccattcatatccgcggtatggaggatttgaggaacagtaaccaggatgtgaatgattttgttacatcagtgttcactgtagccacctaagtaggacattatatgatttcagaatcaatatgtggaacttctttaagcattcagtgtgcccactaaatgccagccacacctccacttgcctcttattgtcttatttttatatatttttctaaatatatgtatatatacagtacatagaaaatagaacttttattttgtgacctaaggacgatggtgaaaagatcacgttttcaaaacaatctggtgatcagaatgttcatataccagctggtttctgaagaggtcagaatgatctttctccatactgacttttaacaatgttgatcattgaggctaaattaatatatatgaaatattcctttttgatgacaccacaaaattgttgaacagtttaagaatttcaaccttaatcttggatccctttacctcatatggaagaacttgagggacattagtatacttttttttaagatggagtcttgctctgtcacccaggttggagtgccatggcatgatcttggctcactgcaacctccacctcctgggtcaagccattctgcttcagccccaagtaggtgggactccaggcatgcaccaccatgcctggctaatttttgcatttttagtagagacagggtttcaccatattggccaggctgggactcgaactcctgaccttgtgatctgcccgcctcagcctcccaaagtactgggattataggcatgagccaccacgcccagcctgttatttttttattattattgtttttttttagtgacagagtctcattctgttgcccatgctggagtgcagtggcgtgatcatagctcactgcagccttgaattcctaggctccagtgatcctctcacctcagcttccctaatagctaggattacaggtgtgtggcctcccaccccaccccacccttcacacctggctgatttttcaaaaagtttttttgtagaaacagggtctcaccatgttgtccagcctggtctcaaactcctgtcctcaagtgatcctcccacctcagcctttcaaagtgctggaattacaggtgtgagccactctgcctggcctaccactaacttgaatacattcagaatcacctcctctccccaaaatttgtagaaatagtttttgaggaagccaaaagcaaagcagaaacctttacagtattgtttcttttctctttgttaactgtgtcattacagcaaaatactagcagtctgcctaaacatgttcattgtacatttctcaggctatcaatgaatggaggtttttaaaaagttgaatatttgtctgaacattttatttcaaagttcaaaaaaacagaggctgcaaaattcattttataatggctattttgtgacgataagatgtagttcatgtttttctgtagcactgggcccaaatattctttgtaaagaaaatcgctgcagcaaaaactgttactgtgtttattatatttgtagaagtattagaaaaatattctattttttattcagtgctgcgtaattacccatggtagccaaccctacaaaagacaggttttcacaaattgaggtggaggtgggcggttcagtatctgccactggacttgattataaactgtatttgaatatcagtggtattatcttttaagttgtcagcaagttaccaaggtattcattaaagaacttgtaatatcaaattactatttattcataacaattgatttgatgctaataataattttctttaaactctaccattcattatgtggtaactgtattgaacttactttatttggattttattttaatgtgactagatgtcaccacttcaaaaaatcaatttgttcttagaacctggttgaaaataccaggaaactgttacagacgccattttttttttttttgagacggagtcttgctctgttgcccaggctggagtgcagtggcacaatctcagctcactgcaagctccgcctcctgggttcacgccattctcccacctcagcttcccaagcagctgggactacaggtacctgccaccacgcctggctaattttgtttttgtatttttagtagagacggggtttcaccgtgttagccaggaaggtctcaatctcctgacctcgtgaatcgcccccctcggtctcccaaagtgctgggattacaggcgtgagccaccatgcccggcccaaatattttttattcaggatggtataacctaactgataataggtaataaggttaaatttttttatgacgtattttatttacaaatatcatacactgctggtgttaccatatgaaaggaaataaagtcaattgataattgcctcaaaaaaaaaaaaaaaaaa

SEQ ID NO: 20 - protein, 1005 aa, Homo sapiens
MMSDASDMLAAALEQMDGIIAGSKALEYSNGIFDCQSPTSPFMGSLRALHLVEDLRGLLEMMETDEKEGLRCQIPDSTAETLVEWLQSQMTNGHLPGNGDVYQERLARLENDKESLVLQVSVLTDQVEAQGEKIRDLEFCLEEHREKLNATEEMLQQELLSRTSLETQKLDLMAEISNLKLKLTAVEKDRLDYEDKFRDTEGLIQEINDLRLKVSEMDSERLQYEKKLKSTKDELASLKEQLEEKESEVKRLQEKLVCKMKGEGVEIVDRDENFKKKLKEKNIEVQKMKKAVESLMAANEEKDRKIEDLRQCLNRYKKMQDTVVLAQGKKGKDGEYEELLNSSSISSLLDAQGFSDLEKSPSPTPVMGSPSCDPFNTSVPEEFHTTILQVSIPSLLPATVSMETSEKSKLTPKPETSFEENDGNIILGATVDTQLCDKLLTSSLQKSSSLGNLKKETSDGEKETIQKTSEDRAPAESRPFGTLPPRPPGQDTSMDDNPFGTRKVRSSFGRGFFKIKSNKRTASAPNLDRKRSASAPTLAETEKETAEHLDLAGASSRPKDSQRNSPFQIPPPSPDSKKKSRGIMKLFGKLRRSQSTTFNPDDMSEPEFKRGGTRATAGPRLGWSRDLGQSNSDLDMPFAKWTKEQVCNWLMEQGLGSYLNSGKHWIASGQTLLQASQQDLEKELGIKHSLHRKKLQLALQALGSEEETNHGKLDFNWVTRWLDDIGLPQYKTQFDEGRVDGRMLHYMTVDDLLSLKVVSVLHHLSIKRAIQVLRINNFEPNCLRRRPSDENTIAPSEVQKWTNHRVMEWLRSVDLAEYAPNLRGSGVHGGLMVLEPRFNVETMAQLLNIPPNKTLLRRHLATHFNLLIGAEAQHQKRDAMELPDYVLLTATAKVKPKKLAFSNFGNLRKKKQEDGEEYVCPMELGQASGSASKKGFKPGLDMRLYEEDDLDRLEQMEDSEGTVRQIGAFSEGINNLTHMLKEDDMFKDFAARSPSASITDEDSNV

SEQ ID NO: 21 - DNA, 1644 bp, Homo sapiens
atgatggaggccatcaagaaaaagatgcagatgctgaagttagacaaggagaatgctctggatcgggcagagcaagctgaagctgagcagaagcaggcagaagaaagaagtaaacagctggaggatgagctggcagccatgcagaagaagctgaaagggacagaggatgagctggacaagtattctgaagctttgaaggatgcccaggagaagctggaactggcagagaagaaggctgctgatgctgaggctgaggtggcctccttgaaccgtaggatccagctggttgaagaagagctggaccgtgctcaggagcgcctggccactgccctgcaaaagctggaagaagctgaaaaagctgctgatgagagtgagagtactcttccaacccaagaggagattgaaaatcttcctgccttccctcgggaaaaactgactctgcgtctcttgctgggaagtggagcctttggagaagtgtatgaaggaacagcagtggacatcttaggagttggaagtggagaaatcaaagtagcagtgaagactttgaagaagggttccacagaccaggagaagattgaattcctgaaggaggcacatctgatgagcaaatttaatcatcccaacattctgaagcagcttggagtttgtctgctgaatgaaccccaatacattatcctggaactgatggagggaggagaccttcttacttatttgcgtaaagcccggatggcaacgttttatggtcctttactcaccttggttgaccttgtagacctgtgtgtagatatttcaaaaggctgtgtctacttggaacggatgcatttcattcacagggatctggcagctagaaattgccttgtttccgtgaaagactataccagtccacggatagtgaagattggagactttggactcgccagagacatctataaaaatgattactatagaaagagaggggaaggcctgctcccagttcggtggatggctccagaaagtttgatggatggaatcttcactactcaatctgatgtatggtcttttggaattctgatttgggagattttaactcttggtcatcagccttatccagctcattccaaccttgatgtgttaaactatgtgcaaacaggagggagactggagccaccaagaaattgtcctgatgatctgtggaatttaatgacccagtgctgggctcaagaacccgaccaaagacctacttttcatagaattcaggaccaacttcagttattcagaaattttttcttaaatagcatttataagtccagagatgaagcaaacaacagtggagtcataaatgaaagctttgaaggtgaagatggcgatgtgatttgtttgaattcagatgacattatgccagttgctttaatggaaacgaagaaccgagaagggttaaactatatggtacttgctacagaatgtggccaaggtgaagaaaagtctgagggtcctctaggctcccaggaatctgaatcttgtggtctgaggaaagaagagaaggaaccacatgcagacaaagatttctgccaagaaaaacaagtggcttactgcccttctggcaagcctgaaggcctgaactatgcctgtctcactcacagtggatatggagatgggtctgattaa

SEQ ID NO: 22 - protein, 547 aa, Homo sapiens
MMEAIKKKMQMLKLDKENALDRAEQAEAEQKQAEERSKQLEDELAAMQKKLKGTEDELDKYSEALKDAQEKLELAEKKAADAEAEVASLNRRIQLVEEELDRAQERLATALQKLEEAEKAADESESTLPTQEEIENLPAFPREKLTLRLLLGSGAFGEVYEGTAVDILGVGSGEIKVAVKTLKKGSTDQEKIEFLKEAHLMSKFNHPNILKQLGVCLLNEPQYIILELMEGGDLLTYLRKARMATFYGPLLTLVDLVDLCVDISKGCVYLERMHFIHRDLAARNCLVSVKDYTSPRIVKIGDFGLARDIYKNDYYRKRGEGLLPVRWMAPESLMDGIFTTQSDVWSFGILIWEILTLGHQPYPAHSNLDVLNYVQTGGRLEPPRNCPDDLWNLMTQCWAQEPDQRPTFHRIQDQLQLFRNFFLNSIYKSRDEANNSGVINESFEGEDGDVICLNSDDIMPVALMETKNREGLNYMVLATECGQGEEKSEGPLGSQESESCGLRKEEKEPHADKDFCQEKQVAYCPSGKPEGLNYACLTHSGYGDGSD

SEQ ID NO: 23 - DNA, 1509 bp, Homo sapiens
atggccgcagaggtgtattttggcgatctagagctcttcgagccgttcgaccacccagaggagtcgattccgaagcccgttcacactcgcttcaaggacgacgacggcgacgaggaggacgaaaatggggtcggcgacgcggagctacgggagcggcttcggcagtgcgaggagaccatcgagcagctccgcgccgagaatcaagaacttaaacgaaaattgaacattctgactcgaccgagtactcttccaacccaagaggagattgaaaatcttcctgccttccctcgggaaaaactgactctgcgtctcttgctgggaagtggagcctttggagaagtgtatgaaggaacagcagtggacatcttaggagttggaagtggagaaatcaaagtagcagtgaagactttgaagaagggttccacagaccaggagaagattgaattcctgaaggaggcacatctgatgagcaaatttaatcatcccaacattctgaagcagcttggagtttgtctgctgaatgaaccccaatacattatcctggaactgatggagggaggagaccttcttacttatttgcgtaaagcccggatggcaacgttttatggtcctttactcaccttggttgaccttgtagacctgtgtgtagatatttcaaaaggctgtgtctacttggaacggatgcatttcattcacagggatctggcagctagaaattgccttgtttccgtgaaagactataccagtccacggatagtgaagattggagactttggactcgccagagacatctataaaaatgattactatagaaagagaggggaaggcctgctcccagttcggtggatggctccagaaagtttgatggatggaatcttcactactcaatctgatgtatggtcttttggaattctgatttgggagattttaactcttggtcatcagccttatccagctcattccaaccttgatgtgttaaactatgtgcaaacaggagggagactggagccaccaagaaattgtcctgatgatctgtggaatttaatgacccagtgctgggctcaagaacccgaccaaagacctacttttcatagaattcaggaccaacttcagttattcagaaattttttcttaaatagcatttataagtccagagatgaagcaaacaacagtggagtcataaatgaaagctttgaaggtgaagatggcgatgtgatttgtttgaattcagatgacattatgccagttgctttaatggaaacgaagaaccgagaagggttaaactatatggtacttgctacagaatgtggccaaggtgaagaaaagtctgagggtcctctaggctcccaggaatctgaatcttgtggtctgaggaaagaagagaaggaaccacatgcagacaaagatttctgccaagaaaaacaagtggcttactgcccttctggcaagcctgaaggcctgaactatgcctgtctcactcacagtggatatggagatgggtctgattaa

SEQ ID NO: 24 - protein, 502 aa, Homo sapiens
MAAEVYFGDLELFEPFDHPEESIPKPVHTRFKDDDGDEEDENGVGDAELRERLRQCEETIEQLRAENQELKRKLNILTRPSTLPTQEEIENLPAFPREKLTLRLLLGSGAFGEVYEGTAVDILGVGSGEIKVAVKTLKKGSTDQEKIEFLKEAHLMSKFNHPNILKQLGVCLLNEPQYIILELMEGGDLLTYLRKARMATFYGPLLTLVDLVDLCVDISKGCVYLERMHFIHRDLAARNCLVSVKDYTSPRIVKIGDFGLARDIYKNDYYRKRGEGLLPVRWMAPESLMDGIFTTQSDVWSFGILIWEILTLGHQPYPAHSNLDVLNYVQTGGRLEPPRNCPDDLWNLMTQCWAQEPDQRPTFHRIQDQLQLFRNFFLNSIYKSRDEANNSGVINESFEGEDGDVICLNSDDIMPVALMETKNREGLNYMVLATECGQGEEKSEGPLGSQESESCGLRKEEKEPHADKDFCQEKQVAYCPSGKPEGLNYACLTHSGYGDGSD

SEQ ID NO: 25 - DNA, 4183 bp, Homo sapiens
gccccgtgtgcagctttcgcggcctgcgtctggagaaaaccctagcgggtggctccgtgcggccagagctctagagagtggtgccgccttccaaccttcttccccaagccctggtggccggctccgcctcttctcgaatcttttccacagcccaaaatggccgcagaggtgtattttggcgatctagagctcttcgagccgttcgaccacccagaggagtcgattccgaagcccgttcacactcgcttcaaggacgacgacggcgacgaggaggacgaaaatggggtcggcgacgcggagctacgggagcggcttcggcagtgcgaggagaccatcgagcagctccgcgccgagaatcaagaacttaaacgaaaattgaacattctgactcgaccgagtggaatattggtgaacgatactaagttagatggacctatattacagattctattcatgaacaatgctatttcaaagcaatatcatcaagaaatagaggaatttgtatcaaatttagtaaaaagatttgaggaacagcagaaaaatgatgtggaaaagacttcctttaatcttttgccccagccatccagtattgtgctagaggaggaccacaaagtggaagagtcctgtgccattaaaaacaacaaggaagctttcagtgttgtaggaagtgtcctgtattttactaatttttgccttgataaattggggcaaccgcttctaaatgaaaaccctcagctttccgaaggatgggaaatacccaagtaccatcaagtcttcagccacattgtttctctagaagggcaagaaatacaagtaaaggcaaaaaggccaaagcctcactgtttcaattgtggttctgaagaacaccaaatgaaagattgcccaatgcctcggaatgctgctcgaataagtgaaaagagaaaagagtatatggatgcctgtggagaagcaaacaatcagaatttccagcagcgataccacgcagaagaagtagaagaaagatttggaagattcaagccaggagttattagtgaggaacttcaagatgcactaggtgtgacagacaagagtcttccaccttttatctatcggatgcgccagctagggtacccaccagggtggctcaaagaggctgaattggagaattcggggcttgcactctatgatggaaaagatggcactgatggggaaacagaagttggagaaatacaacagaataaaagtgtcacttacgatctctcaaaattggtcaactatcctggttttaatatatctactcccagaggaattccagacgaatggaggatctttggttccataccaatgcaggcatgtcagcagaaggatgtgtttgccaattaccttacttctaacttccaagcgccaggtgtgaagtctggcaacaagaggtcttcatctcactctagcccaggtagtccaaagaagcagaagaatgaaagcaactcagcgggatctcccgccgacatggagctcgattcagatatggaggtaccacatggttctcagagcagcgaaagttttcagtttcaaccaccattacctcctgacactcctccactcccccggggaactcctccacccgtcttcacccctccactcccaaagggcaccccgccgctgactcccagtgactcaccccagaccagaacagcatctggagctgtggatgaggacgcactgactctagaagaacttgaagaacagcagaggcggatctgggcagctcttgagcaggccgagagcgtaaacagcgactccgacgttcctgtggacacacctttaactggcaattccgttgcctcatcaccttgtccaaatgagctagacctccctgtcccggagggaaaaacatctgaaaagcagacgctggatgagcctgaggtaccagagatttttacaaagaaatcagaagctggacatgcctccagtccagactctgaggtgacatcactttgtcagaaggaaaaagcagagttggctccggtaaacactgaaggtgcccttcttgataatggcagtgtcgtaccaaactgtgacatcagcaatgggggcagccagaagctctttcctgcagacaccagtccttcaacggccactaaaattcatagccctatacctgacatgagcaaatttgcaactggaatcacgccatttgaatttgagaatatggcagaatctactggaatgtacctcaggataagaagcttgttaaagaactcaccccgaaaccagcagaaaaacaaaaaggcctctgaataatggcttgacttagcactgagagctatttaataactttgttccgttaattagtactaattaagtggatagatagaatggttttcctgtttgtccctcccatgtttaaaaatctatccaaggttcatgttccaaagtcaagcctattttaaagaaagactgagctcactagttcagtatattttattctcactgacaaaacttggggggagatgtgaatatgacctggtttagagagggtttgttaaggtttatactatttttggattgtgactatccgtcgagagtgatggtttttatctgtcttttgtacattgttttccctttctacattttgctaattatcctgtatataagtttaatatatcactttttaaaagaaaaaattctaccattttaaattcatgtttcaactcctacaaccaaatgagaaaaatcagggatgagcagctttatcccatttggggtatttttgtaagtgatttacatgtgtcaattttagtaatacttttacttttttgtaacttcatccttcatatatgcttgctatacaggtatgttcatctttgtgtacagaggtttaataaattagttttcatatacataatctaagactttgaatacaaaaaagtgattcacaggtaaaatcagtgtatataaccttttttttttttgagacaagggtttcactcttgttgcccaggctggagtgcaatggcacaatctcggctcaccgcaacctccgcctcccgagtttaagcgattctcctgcctcagcctccggagtagctgggattacaggcatgtgccaccacgcccagctaacttcgtatttttagtagagatggggtttctccacgtcgggtcaggctggtcttgacctcctgacttcaggtgatctgcccgcccagcctcccaaagtgctgggattacaggcgtaagccacctcacctggccggtgcatataacttttaagtttaaaagtaaattgttggccaggcgtggtggctcatgcttataatcctagcactttgggaggccaaggaggaaggatcacctgaggtcaggagttcgagaccagcctggccaacatggcaaaaccccatctctacataaatacaaaaattagccaggtgtggtggtacatgcctgtaatcccagctactcgggaggctgaggcaggagaatcacttgaacctgggagtgggaggttgcagtgagccgaggtcgcgccattgcactccagcctgggcaacaagagcaaaactccatctcaaaaaaaaaaaaaaaaaaaggtaaattgtaaaaatcagtggtagcaaaacaaaaataatgataggaattgcaagtttgggtgttttcagtggatttcagccttaaatatagaaacagcagaatttttgaaaagtaattattttgaaaaatgaatggcatgcagctagcctttgtataaaaataattttctagatttgaaccctaatagttaaaaattaaaaattaaacataaacatactgcttttaattgtcaggtatatatataagatagagctgaaactgtggtttaggtctttctgtggaatgccattacatctttatattagtcaagtccatgaaaataaatgtttagatcgtcttgaattgttagtctcaggcagtgttatcctgctctcaggccaacagggggagcaaaatagaaacattccagatatagctttcatttttgagaacttgagtaatcagaatttactgttctgtaaagaataaaggaaaggaaaattataaagagagaaatttctttttaaagccctcacagaatgtgctagaaatagaataaaatttaaaatacttttggcttcttttcctcagcttaagttcaaaataaaagcaatcctttacagttgaaaaa

SEQ ID NO: 26 - protein, 707 aa, Homo sapiens
MAAEVYFGDLELFEPFDHPEESIPKPVHTRFKDDDGDEEDENGVGDAELRERLRQCEETIEQLRAENQELKRKLNILTRPSGILVNDTKLDGPILQILFMNNAISKQYHQEIEEFVSNLVKRFEEQQKNDVEKTSFNLLPQPSSIVLEEDHKVEESCAIKNNKEAFSVVGSVLYFTNFCLDKLGQPLLNENPQLSEGWEIPKYHQVFSHIVSLEGQEIQVKAKRPKPHCFNCGSEEHQMKDCPMPRNAARISEKRKEYMDACGEANNQNFQQRYHAEEVEERFGRFKPGVISEELQDALGVTDKSLPPFIYRMRQLGYPPGWLKEAELENSGLALYDGKDGTDGETEVGEIQQNKSVTYDLSKLVNYPGFNISTPRGIPDEWRIFGSIPMQACQQKDVFANYLTSNFQAPGVKSGNKRSSSHSSPGSPKKQKNESNSAGSPADMELDSDMEVPHGSQSSESFQFQPPLPPDTPPLPRGTPPPVFTPPLPKGTPPLTPSDSPQTRTASGAVDEDALTLEELEEQQRRIWAALEQAESVNSDSDVPVDTPLTGNSVASSPCPNELDLPVPEGKTSEKQTLDEPEVPEIFTKKSEAGHASSPDSEVTSLCQKEKAELAPVNTEGALLDNGSVVPNCDISNGGSQKLFPADTSPSTATKIHSPIPDMSKFATGITPFEFENMAESTGMYLRIRSLLKNSPRNQQKNKKASE

SEQ ID NO: 27 - DNA, 4563 bp, Homo sapiens
atggctgcgtcggagctctacacaaagtttgccagggtttggatacctgatccagaggaagtctggaagtcagcagagctgctcaaagattataagccaggagataaagtcctcctgcttcacctcgaggaaggaaaggatttggaataccatctagatccaaagaccaaggagctgcctcacttacgaaatcctgacatacttgttggtgaaaatgacctcacagccctcagctatcttcatgagcctgctgtgctccataatctcagagtccgctttattgattccaaacttatttatacgtattgtggtatagtcctagtagctataaatccctatgaacagctgcctatttatggagaagatattattaatgcatacagtggtcagaacatgggtgatatggatccacatatctttgcagtagctgaagaagcttacaagcaaatggccagagatgaacgaaatcagtccatcatcgtaagtggagagtctggggcaggaaaaacagtctcagctaagtatgccatgcgatactttgcaactgtgagtggttctgccagtgaggccaatgtggaggaaaaggtcttggcctccaaccccatcatggagtccattggaaatgctaaaacaaccaggaatgataatagcagccgttttgggaagtatattgagattggttttgataagagatatcgaatcattggtgccaatatgagaacttatcttttagagaaatccagagtggtattccaggcagaagaggagagaaactatcatatcttctatcagctttgtgcctcagcaaagttacctgaatttaaaatgctacgattaggaaatgcagataactttaattacacaaaacaaggaggcagtcctgtgattgaaggagtggatgatgcaaaggagatggcacatactaggcaggcctgcactttgctaggaattagtgaatctcatcaaatgggaattttccgaatacttgctggcatccttcacttaggcaatgttggatttacatcccgagatgcagacagctgcacaatacctcccaagcatgaacctctctgcatcttctgtgacctcatgggtgtggactatgaggagatgtgtcactggctctgccatcggaaactggctactgccacagagacatacatcaagcccatctccaagctgcaggccacgaatgcccgcgatgctttggccaagcacatctatgccaagctctttaactggattgtagataatgtcaatcaggctctccattctgctgtcaaacagcactcttttattggtgtgctagacatttacggatttgaaacatttgagataaatagttttgaacagttttgcataaattatgcaaatgaaaaactacagcaacaattcaatatgcatgtcttcaaattggagcaagaagaatatatgaaggaacaaattccatggacactcatagatttttatgataatcagccttgtattaatcttatagaatcaaaactaggcattctagatttactggatgaggaatgcaagatgcctaaaggcacagatgacacctgggcccaaaaattgtacaacacacatttgaacaaatgtgcactctttgaaaagcctcgtctatcaaacaaagctttcatcatccaacattttgctgacaaagtggaataccagtgtgaaggatttctcgaaaagaataaagacaccgtttttgaagaacaaattaaagttcttaaatcaagcaagtttaagatgctaccagaactatttcaagatgatgagaaggccatcagtccaacttcagccacctcctcagggcgcacacccctcacacgaactcctgcaaagcccaccaaaggcagaccaggccaaatggccaaagagcacaagaaaacagtggggcatcagttcagaaactccctgcacctgcttatggagacactcaatgccactacccctcactatgtgcgctgtatcaagcctaatgacttcaagttcccattcacgtttgatgagaagagggcagtgcagcagctgagagcatgtggtgtcctggaaaccatccgaatcagtgcggccggtttcccctcacggtggacttaccaagaatttttcagccgctaccgtgtcctaatgaagcagaaagatgtgctgagtgacagaaagcaaacatgcaagaatgtgttagagaaactgatactggacaaggacaaataccagtttggtaagacaaagatctttttccgtgccggtcaagtggcctatctagaaaaattgagagctgacaaactgagagctgcctgcatccggatccagaagaccatccgagggtggctgctgagaaagaagtacctacgcatgcggaaggcagccatcaccatgcagagatacgtgcggggctaccaggcccgatgctatgctaagtttctgcgcagaaccaaggcagcaaccatcattcaaaagtactggcgcatgtatgtggtccgcaggaggtacaagattagacgagctgccactattgttcttcagtcttacttgcgaggcttcttggccagaaataggtatcgcaagatactccgtgagcacaaagcagtcatcattcagaagcgagtccggggctggctggcccgcacacactacaagaggagcatgcatgccatcatctaccttcagtgctgcttcaggcggatgatggccaagcgtgagctaaagaagctcaaaatcgaggctcgctcagtggagcgctataagaagctgcacatcggcatggagaacaagatcatgcagctgcagcgcaaagttgatgagcagaacaaagactacaaatgccttgtggagaaactaaccaatctggaaggaatatacaactctgagactgagaaactacgaagtgacttagaacgtcttcaactaagtgaagaggaagcgaaagttgccactgggcgggtccttagtctgcaggaagaaattgccaagctccggaaagacctggagcaaactcgttcagagaaaaaatgcattgaggaacatgcagatcgatacaaacaagaaacagagcagctggtatcaaatctgaaggaagaaaatactttgctgaagcaagaaaaagaagccctcaatcaccgcatcgtgcagcaggctaaggagatgacagtctggcatagaagattaaagaatcaaaaaagtgccaaggaaggggtgacagtgcttataaacgaagacaaagagttggctgagctgcgaggtctggcagccggagtaggcctggctaatgcctgctatgcaatacatactcttccaacccaagaggagattgaaaatcttcctgccttccctcgggaaaaactgactctgcgtctcttgctgggaagtggagcctttggagaagtgtatgaaggaacagcagtggacatcttaggagttggaagtggagaaatcaaagtagcagtgaagactttgaagaagggttccacagaccaggagaagattgaattcctgaaggaggcacatctgatgagcaaatttaatcatcccaacattctgaagcagcttggagtttgtctgctgaatgaaccccaatacattatcctggaactgatggagggaggagaccttcttacttatttgcgtaaagcccggatggcaacgttttatggtcctttactcaccttggttgaccttgtagacctgtgtgtagatatttcaaaaggctgtgtctacttggaacggatgcatttcattcacagggatctggcagctagaaattgccttgtttccgtgaaagactataccagtccacggatagtgaagattggagactttggactcgccagagacatctataaaaatgattactatagaaagagaggggaaggcctgctcccagttcggtggatggctccagaaagtttgatggatggaatcttcactactcaatctgatgtatggtcttttggaattctgatttgggagattttaactcttggtcatcagccttatccagctcattccaaccttgatgtgttaaactatgtgcaaacaggagggagactggagccaccaagaaattgtcctgatgatctgtggaatttaatgacccagtgctgggctcaagaacccgaccaaagacctacttttcatagaattcaggaccaacttcagttattcagaaattttttcttaaatagcatttataagtccagagatgaagcaaacaacagtggagtcataaatgaaagctttgaaggtgaagatggcgatgtgatttgtttgaattcagatgacattatgccagttgctttaatggaaacgaagaaccgagaagggttaaactatatggtacttgctacagaatgtggccaaggtgaagaaaagtctgagggtcctctaggctcccaggaatctgaatcttgtggtctgaggaaagaagagaaggaaccacatgcagacaaagatttctgccaagaaaaacaagtggcttactgcccttctggcaagcctgaaggcctgaactatgcctgtctcactcacagtggatatggagatgggtctgattaa

SEQ ID NO: 28 - protein, 1520 aa, Homo sapiens
MAASELYTKFARVWIPDPEEVWKSAELLKDYKPGDKVLLLHLEEGKDLEYHLDPKTKELPHLRNPDILVGENDLTALSYLHEPAVLHNLRVRFIDSKLIYTYCGIVLVAINPYEQLPIYGEDIINAYSGQNMGDMDPHIFAVAEEAYKQMARDERNQSIIVSGESGAGKTVSAKYAMRYFATVSGSASEANVEEKVLASNPIMESIGNAKTTRNDNSSRFGKYIEIGFDKRYRIIGANMRTYLLEKSRVVFQAEEERNYHIFYQLCASAKLPEFKMLRLGNADNFNYTKQGGSPVIEGVDDAKEMAHTRQACTLLGISESHQMGIFRILAGILHLGNVGFTSRDADSCTIPPKHEPLCIFCDLMGVDYEEMCHWLCHRKLATATETYIKPISKLQATNARDALAKHIYAKLFNWIVDNVNQALHSAVKQHSFIGVLDIYGFETFEINSFEQFCINYANEKLQQQFNMHVFKLEQEEYMKEQIPWTLIDFYDNQPCINLIESKLGILDLLDEECKMPKGTDDTWAQKLYNTHLNKCALFEKPRLSNKAFIIQHFADKVEYQCEGFLEKNKDTVFEEQIKVLKSSKFKMLPELFQDDEKAISPTSATSSGRTPLTRTPAKPTKGRPGQMAKEHKKTVGHQFRNSLHLLMETLNATTPHYVRCIKPNDFKFPFTFDEKRAVQQLRACGVLETIRISAAGFPSRWTYQEFFSRYRVLMKQKDVLSDRKQTCKNVLEKLILDKDKYQFGKTKIFFRAGQVAYLEKLRADKLRAACIRIQKTIRGWLLRKKYLRMRKAAITMQRYVRGYQARCYAKFLRRTKAATIIQKYWRMYVVRRRYKIRRAATIVLQSYLRGFLARNRYRKILREHKAVIIQKRVRGWLARTHYKRSMHAIIYLQCCFRRMMAKRELKKLKIEARSVERYKKLHIGMENKIMQLQRKVDEQNKDYKCLVEKLTNLEGIYNSETEKLRSDLERLQLSEEEAKVATGRVLSLQEEIAKLRKDLEQTRSEKKCIEEHADRYKQETEQLVSNLKEENTLLKQEKEALNHRIVQQAKEMTVWHRRLKNQKSAKEGVTVLINEDKELAELRGLAAGVGLANACYAIHTLPTQEEIENLPAFPREKLTLRLLLGSGAFGEVYEGTAVDILGVGSGEIKVAVKTLKKGSTDQEKIEFLKEAHLMSKFNHPNILKQLGVCLLNEPQYIILELMEGGDLLTYLRKARMATFYGPLLTLVDLVDLCVDISKGCVYLERMHFIHRDLAARNCLVSVKDYTSPRIVKIGDFGLARDIYKNDYYRKRGEGLLPVRWMAPESLMDGIFTTQSDVWSFGILIWEILTLGHQPYPAHSNLDVLNYVQTGGRLEPPRNCPDDLWNLMTQCWAQEPDQRPTFHRIQDQLQLFRNFFLNSIYKSRDEANNSGVINESFEGEDGDVICLNSDDIMPVALMETKNREGLNYMVLATECGQGEEKSEGPLGSQESESCGLRKEEKEPHADKDFCQEKQVAYCPSGKPEGLNYACLTHSGYGDGSD

SEQ ID NO: 29 - DNA, 12238 bp, Homo sapiens
accccgggcaggtggagcgctcgcggctgctcgcggcgagcccgggagtgatggcgaggcccctgcgggcggccagcgcctgaggcgccccgccccgccccgccccgcgcggccctccccgcccggccctgccctgccctgctccctgccggcggctgcgggcgcttcctagtccgctcgggcggccgcccaggcgaggtgcggcctccgcacaggcggggggcgtaggcgcgcggggcccgccatggctgcgtcggagctctacacaaagtttgccagggtttggatacctgatccagaggaagtctggaagtcagcagagctgctcaaagattataagccaggagataaagtcctcctgcttcacctcgaggaaggaaaggatttggaataccatctagatccaaagaccaaggagctgcctcacttacgaaatcctgacatacttgttggtgaaaatgacctcacagccctcagctatcttcatgagcctgctgtgctccataatctcagagtccgctttattgattccaaacttatttatacgtattgtggtatagtcctagtagctataaatccctatgaacagctgcctatttatggagaagatattattaatgcatacagtggtcagaacatgggtgatatggatccacatatctttgcagtagctgaagaagcttacaagcaaatggccagagatgaacgaaatcagtccatcatcgtaagtggagagtctggggcaggaaaaacagtctcagctaagtatgccatgcgatactttgcaactgtgagtggttctgccagtgaggccaatgtggaggaaaaggtcttggcctccaaccccatcatggagtccattggaaatgctaaaacaaccaggaatgataatagcagccgttttgggaagtatattgagattggttttgataagagatatcgaatcattggtgccaatatgagaacttatcttttagagaaatccagagtggtattccaggcagaagaggagagaaactatcatatcttctatcagctttgtgcctcagcaaagttacctgaatttaaaatgctacgattaggaaatgcagataactttaattacacaaaacaaggaggcagtcctgtgattgaaggagtggatgatgcaaaggagatggcacatactaggcaggcctgcactttgctaggaattagtgaatctcatcaaatgggaattttccgaatacttgctggcatccttcacttaggcaatgttggatttacatcccgagatgcagacagctgcacaatacctcccaagcatgaacctctctgcatcttctgtgacctcatgggtgtggactatgaggagatgtgtcactggctctgccatcggaaactggctactgccacagagacatacatcaagcccatctccaagctgcaggccacgaatgcccgcgatgctttggccaagcacatctatgccaagctctttaactggattgtagataatgtcaatcaggctctccattctgctgtcaaacagcactcttttattggtgtgctagacatttacggatttgaaacatttgagataaatagttttgaacagttttgcataaattatgcaaatgaaaaactacagcaacaattcaatatgcatgtcttcaaattggagcaagaagaatatatgaaggaacaaattccatggacactcatagatttttatgataatcagccttgtattaatcttatagaatcaaaactaggcattctagatttactggatgaggaatgcaagatgcctaaaggcacagatgacacctgggcccaaaaattgtacaacacacatttgaacaaatgtgcactctttgaaaagcctcgtctatcaaacaaagctttcatcatccaacattttgctgacaaagtggaataccagtgtgaaggatttctcgaaaagaataaagacaccgtttttgaagaacaaattaaagttcttaaatcaagcaagtttaagatgctaccagaactatttcaagatgatgagaaggccatcagtccaacttcagccacctcctcagggcgcacacccctcacacgaactcctgcaaagcccaccaaaggcagaccaggccaaatggccaaagagcacaagaaaacagtggggcatcagttcagaaactccctgcacctgcttatggagacactcaatgccactacccctcactatgtgcgctgtatcaagcctaatgacttcaagttcccattcacgtttgatgagaagagggcagtgcagcagctgagagcatgtggtgtcctggaaaccatccgaatcagtgcggccggtttcccctcacggtggacttaccaagaatttttcagccgctaccgtgtcctaatgaagcagaaagatgtgctgagtgacagaaagcaaacatgcaagaatgtgttagagaaactgatactggacaaggacaaataccagtttggtaagacaaagatctttttccgtgccggtcaagtggcctatctagaaaaattgagagctgacaaactgagagctgcctgcatccggatccagaagaccatccgagggtggctgctgagaaagaagtacctacgcatgcggaaggcagccatcaccatgcagagatacgtgcggggctaccaggcccgatgctatgctaagtttctgcgcagaaccaaggcagcaaccatcattcaaaagtactggcgcatgtatgtggtccgcaggaggtacaagattagacgagctgccactattgttcttcagtcttacttgcgaggcttcttggccagaaataggtatcgcaagatactccgtgagcacaaagcagtcatcattcagaagcgagtccggggctggctggcccgcacacactacaagaggagcatgcatgccatcatctaccttcagtgctgcttcaggcggatgatggccaagcgtgagctaaagaagctcaaaatcgaggctcgctcagtggagcgctataagaagctgcacatcggcatggagaacaagatcatgcagctgcagcgcaaagttgatgagcagaacaaagactacaaatgccttgtggagaaactaaccaatctggaaggaatatacaactctgagactgagaaactacgaagtgacttagaacgtcttcaactaagtgaagaggaagcgaaagttgccactgggcgggtccttagtctgcaggaagaaattgccaagctccggaaagacctggagcaaactcgttcagagaaaaaatgcattgaggaacatgcagatcgatacaaacaagaaacagagcagctggtatcaaatctgaaggaagaaaatactttgctgaagcaagaaaaagaagccctcaatcaccgcatcgtgcagcaggctaaggagatgacagaaactatggagaagaagttagtagaagaaacgaaacaactggaactcgaccttaatgatgaaaggctgagatatcagaaccttctgaatgagttcagtcgcctggaagaaagatatgatgacctcaaggaagagatgacccttatggtgcatgtgcctaagcctggacacaagagaacagactccacccacagcagcaacgagtctgaatatatctttagctctgaaattgcagaaatggaagacattccatcaaggacagaggaaccaagtgagaagaaggtacctctggacatgtcattgttccttaagctccagaagcgggtcacagagctggagcaggagaagcaggtgatgcaggatgagctggaccgcaaggaggagcaggtgctccgcagcaaggccaaggaagaagaaagaccacaaattagaggtgcagaactggaatatgagtcactcaagcgtcaagaactagaatcagaaaacaaaaaactgaagaatgagctaaatgagttgcgcaaggccctcagtgagaaaagtgccccagaggtgaccgccccaggtgcacctgcctaccgtgtcctcatggagcagctgacctctgtgagcgaggagcttgatgtccgcaaggaggaagtcctcatcttaaggtctcaactggtgagccagaaagaggccatccaacccaaggatgacaagaatacaatgacagattccacaatacttttggaagatgtacaaaaaatgaaagataaaggtgaaatagcacaagcatacattggtttgaaagaaacaaatagatcatctgctctggattaccatgagttgaatgaggatggagagctgtggctggtttatgaagggttaaaacaagccaacaggctcctggaatcccagctgcagtcacagaagaggagccatgagaatgaggccgaggccctccgtggggagatccagagcctgaaggaggagaacaaccgacagcagcagctgctggcccagaacctgcagctgcccccagaggcccgcattgaggccagcctgcagcacgagatcacccggctgaccaacgaaaacttggatttgatggaacaacttgaaaaacaggataagacggtccgtaaactgaaaaaacaactgaaagtatttgccaaaaaaattggcgaactagaagtgggccagatggagaacatatccccaggacagatcattgatgaacccatccgaccagtcaacattcccaggaaagaaaaggatttccaagggatgctggaatacaagaaggaggatgagcaaaaacttgttaagaacctgattctggaactgaagccacgtggtgtagcagtcaatttgattccaggattaccggcatatatcctgttcatgtgtgttcgacatgctgactacctgaatgatgatcagaaagtaaggtcgttgctaacatcaacaattaacagcatcaaaaaagtattgaagaaaagaggtgatgattttgaaaccgtctccttctggctctctaacacatgccgatttttgcactgcttgaaacagtacagtggagaagagggctttatgaagcacaacacatctcgccagaatgaacactgcctcaccaattttgacctggctgagtatcggcaggtgctgagtgacttggccattcagatctaccagcagctcgtgcgggtgttagagaacatccttcagccaatgattgtctcaggcatgctggaacatgaaacgattcagggcgtgtctggggtgaagcccacagggttgagaaagcgaacctccagtatcgccgatgagggcacctacacactggactccatcctccggcagctcaactccttccactcggtcatgtgtcagcatggcatggaccctgaactgatcaagcaggtggtcaagcagatgttctacatcataggggccatcaccctgaacaaccttctcctgcggaaggacatgtgctcctggagtaaaggcatgcagatcaggtacaatgtcagtcaactggaagaatggctgcgtgacaagaatctgatgaatagtggggctaaagaaaccctggaacctctcattcaggctgctcaacttttgcaagtgaaaaagaaaacagatgatgatgcagaagccatttgttctatgtgcaatgctttaactactgcccagattgtgaaagtgttgaatttgtatactccagttaatgagtttgaagaaagagtctctgtgtcgttcattcgtactatacagatgcgtttacgagacaggaaagactctccccagctgctcatggatgctaaacacatctttcctgtcacctttcctttcaacccatcttccctcgcactagaaaccatccagattccagccagcctcggcctgggcttcatttcacgggtctgaaagtgatgtccaggcaaaaattgacaatacatttcttgcccgaaataagaacccattatttccagtgagttactgaaaatacatttttaaagagaaagtactgattatctcccaaatgagaagtcattaactggaaatctccctagaatactttcatcactttggaaacaaagataggctctttcgtgctgtgttatctttatagcaacactcatccttaaccaactaggtaccgtgagtttacatacaggagaatgatggaaggaagggaggaaggaaaggaggagaaaaatgtgtcttcagctggcagcatttattttaaatccttagcactgagtttgaatggtataaaaagtataacttccatagatgagctgttgttaggaaggcaccaaagaacctcctctgcactaaacaggagaatggaaagaaaagtctccattgagtacatatcatgtcagtttagtaatcaattatgttgatattgttaaactggttcaaagaaataaactggcaatatgtaaagtaattcctcatttgtgtcactatgatatagagatattaaaggaatgttggtttgctaaatagtatagatgtccatttgtactatagtttactgagcattttaaattgctgctacatactgtcttcttaaaatgtaagtgatattaggcactacaataagtttctcttgtcaattctgtttacaattcaatcagatcacagttttaactggattatatgcaaatacctacagattcacctgcacaagtagcagacactggaaagtcatgtagtaatatgacaaaatgcttgacatttaggggtaggattagacaaagtggctattgttgatgtcattatttattcaggatgtattacattgatgtgctcattaattttccctgggtggatattgcgtcagggtacagtgttctgtgaagtgacttatttttaactaccagatctgattccttcagtgcatattttcaaccttgacaggttttctctcttcttaatttattaagaattaatctcggctgggcgcggtggctcacgcctgtaatcccagcactttgggaagccaaggtgggcggatcacttcaggttaggagttggagaccagcctggccaacatggcgaaaccctgtctctactaaaaatacaaaaattagccgggcgtggtggcacttgcctgtaatcccagctactcgggaggctgaggcacgagaatcgattaaacctgggaggcggagattgcaatgagatcgaaccactgcactccagcctgggtgacagagagagacactgccttggaaaaaaaaagaatctcactcactatctagagaggattgtcagaatattcacgattcaggtcttgaaactttgattatgcaaaagaaggtatataataaatatttcattatgattcagtttttaaggctttgcagcttctataagtgttctcagatgccactagataattttaaaagcatcatattagaaatactttaagaagacttatataagaaatagaagattgttgaattttacagaggatttggttcattaagacccagattctgtaagttttcattctgaaattctagttaaacatattcaccatttttcttaggaatcttatacaataaatccttcaggttgcacaaaagcaaattattagttttcattagaaactctggttctgaattacaatcataggttatataaatttaactgttagatggtctataaatcttattaaaatatgtgcaatatttatggaagtcaaacagcttcatatcagtgataaagattgttattaaaagataaatactgtctgttaatttacatgggcctcaagttcctcgtttataaaataagagagttggacactgattcttaacatctcctccacatttaaaattctctcttctcagcccttagattctagagagaaaaagctgcagttactcagtaagtccattctctgatggaaagaccagtgtgtagtgcctgtcaattccttaggattaatcaaatgtaaaatcacaagtttgtgtagctgtaacctttcttaaatgtacatgatttatgtacatgcttttagaaggtcctactatatttgtattataattagtttaagtaatttttattacatcatgtattgctttattcagtttgaatacatttatttatttatttgcagtatcaaccagaaacactaccaattgcatcaaattctcccagtttttcctggttgtcaatgcggttttcaatgcacaattaagtcatagccatttggttcgtaccaaatgtgtcagaatctaacagcatccgataggctgtaagttggggagttgctaagaaaatgcaacgtggtacaggctgtccgcctcagccctggaaatctcccagacctcccccagcttcatcctgtgtagcacgactcaacgtgcaccctgaatcttctcaggtcttccaggtcatgctgtagctgtcactgccatgcagcccttttttttactccggacagctcatgtactgaagcgtcatgaaagaaaggctgtggtctgagcccttctctcccatctcctgtctttgtcctgtcaagtgctggagccagagctcctacagctgcccttggtggtttctcctgttcagcgatggtggcacaaaggttctgctattccagggctccagcttcctcccaggtctacccagagctccagatgggggtctgaattaacctctcttggtggcctggagatttttagtcattgacaagaataccttgtaaccagggaaccccaaggcccagtaaatgattctgtataccattttcttgaaggtacaagaagattctgccgactatggggatctttgggccagtttgaggattgctttccctctgaggttctttctctctgtcagccacactttctcacccaacttcagacacaccctgccagcctttcccctactcattcactcttccccttccctcaacttaatcgtctatcccgttgcctgctgtttgactgtgcactgaaggcaggtggatggagtcagtcctcagttgcccctgctggccttcctggtgcttaccatcagcccaatctttgcacagtccttgttgttcttacttctctgcatgcattccttcagaagatcagtcatcaactttttcttaattcctctgtgacacacaatgggaattcaaaggaagagatcttaaaagtcacaacagttctttatcttaataatcccctccccattcaccttactacatgcagactcacctcacacccttacaacttgaagctgaaaatttaaaagtaatttccctttttgcagcttttcctcaggttaaggctttgatctgcctgagagtaactctaaaaggagggaagataaatatgggataaaatccacaaagtgtagcttctaattcctttggaagtttaaaaaatttccacatatctgatgcttcttttgtcaggtgcagaagcacaaaaacatattccgaagccaactgatagggaatttggggattattgtcagtttggagaatttgctgtgttatttcttcatttccatggatagctcatagttggctctttctgggtgagtaattatgtgtaatatagatcaaatcttttactaaggttacagctacatgttaggggaggctatgaaaatactatattattataatttcagtgcagtgattgttgtgagaaataactttcatggtaaccctaggaaaatgggcacctgccaccatcctgagaagtcctcacacaatgccctttctctcttacacacacacacacacacatacacacacacacacccccgtcactaattcatagagttccttagcaggcatagtcaaggatcctctgggtaatgtcagctgcttagtgataaaacagagccaaaactagtgcatcctgttgaaagtaatgcagaaacagtacctgggtccagatatgctttcctgcggcgctttcctctgttacctcgtttcatcctcacagcagcatggacggtaggtggggtcgcttctacaatcatttctgatgatagcttgggaatagagataggggcagtgacttgcctgatgtcgcacagccctctggctgtcctgctttcccatatggagcagtggtggtgtgggcacctgtgatgcaggagactttaaaaatgtcgtgaggtcacgtgctgcccctcctggtacgtgtggaatgcccctggccagcaaggggtgcttttttatcagagttggcagctggcatgtgggaaccgagcaagtgctgcgtaccaagttacttgttttaaggagaccaagtgctcagcgccaggtggttttcttttttgtcatagttacttgctataactcagcttgacttctgtcatgaatcagtgctctctgggaggatgcaatactctgtttgggcattaattggtagcaggttgtctcaaccaaaaagacaggaaacagcaaaagcctctctgaaattaagaggaaagttactctccccacacccatcagagtctttattggagccaccaggtgagctgtgcagcctggacaggcctgcagctataggccaccttcccagtttaggtcctcagcacaggggagcccaagtcactgggtgccttccgagggctgtcactgggcaggccatatacaagtcagtgtgtgcgtgggcactgcagtgtgtgcatgccgtaggtgttgatgggtgctaggaggggtgtcgtgtgcatgcgcgttgaagaggatctgtattgccgtgacctctgttcatggatgagtgcattgtaatttgttctcaggctgtgctgtgagggccgccttaacccttgctcccttcccttctagagctgccttaagttctccagaacttttcttctgtaaaggatatcttgcctggaagggatatcttgccctgtttctcaaggttttgtgagagttttgactggatgtggccctgcatgaccctccttctcctgtacttcctctttcctttccaaatgggaattagaactgtggggcagcaacagtctcagagccagtgagaggccagcttagagaatgcttctgagttagtgggactctgtgtcacaagtaagcaaatgaatatatgaaagaaattatggagataagttagattcttggtaatacttaaatgtcttgctttctactaaccttttgttactaaaggtaaagggtataactcaaactttttgtggacattcttttcaaaattttttaagaaccctgtactataaaaggttgagtaaaaacaggaaagcgtgctataagttcaaatctgttgtattaccctaaattagataaaccaacctgaattatagtagatttctcaatagatgaggaactgaaaaatactatgtaaaatatcttccaaaatgctttttatactttttttatttgtaatttggtctatctaaaatgttcgttagcttaacttaatgggcgttattggattcatatgactaacgtttcctcagtattgtaatgcttgaaatatttgaaagaaaaaatgttgttttttagttgaaactggtatatataattcagtgcttggcaggttagtatatttttatgcatttttcagagtcagcagtttcaaatcttattgttatcatgttataaaattttagcccacatttcaggctccgtaaatcatttgagccattattttttcccaacaaatggtgaattttttctttaaatgtggatatatatgttgtaatttatgattcctggttatgtatttttgtgggatcctgcagtaaaattgacttttttgtgtctttgggagatttaaattgcgctaacagtgttgcgcaaaaatgagttcatgccatttaacatattgtattttaattattaactgtattaatttactatgaaatggacatccttttaactaaaatggaattgaacattgcagttttcaaatatttttccttgttgggtctggaaaaggaattctactttgatctgcatagaaaattttgatacaattttttgaaagttcttaggtgaaacatttacccattaaaaaggaagcagaaatactgagacatgaaaggcattatcaactaactctagactctagaacccattctagcatatctcacgtgcaatttttaaaaataagttaataattcatctcatatcaacaaaagcctttgaaacatgggttttcactagatatcacctagtgctaagataaaaaccaaaacaatatcagaattacatttatgctctaaatttgtagttgtccattgttgtgcttagtaaatgtgtgtcattaatgctgtattctcctagctattatggaaacttgtttaaataaagatatggatataaaaaaaaaaaaaaaa

SEQ ID NO: 30 - protein, 1855 aa, Homo sapiens
MAASELYTKFARVWIPDPEEVWKSAELLKDYKPGDKVLLLHLEEGKDLEYHLDPKTKELPHLRNPDILVGENDLTALSYLHEPAVLHNLRVRFIDSKLIYTYCGIVLVAINPYEQLPIYGEDIINAYSGQNMGDMDPHIFAVAEEAYKQMARDERNQSIIVSGESGAGKTVSAKYAMRYFATVSGSASEANVEEKVLASNPIMESIGNAKTTRNDNSSRFGKYIEIGFDKRYRIIGANMRTYLLEKSRVVFQAEEERNYHIFYQLCASAKLPEFKMLRLGNADNFNYTKQGGSPVIEGVDDAKEMAHTRQACTLLGISESHQMGIFRILAGILHLGNVGFTSRDADSCTIPPKHEPLCIFCDLMGVDYEEMCHWLCHRKLATATETYIKPISKLQATNARDALAKHIYAKLFNWIVDNVNQALHSAVKQHSFIGVLDIYGFETFEINSFEQFCINYANEKLQQQFNMHVFKLEQEEYMKEQIPWTLIDFYDNQPCINLIESKLGILDLLDEECKMPKGTDDTWAQKLYNTHLNKCALFEKPRLSNKAFIIQHFADKVEYQCEGFLEKNKDTVFEEQIKVLKSSKFKMLPELFQDDEKAISPTSATSSGRTPLTRTPAKPTKGRPGQMAKEHKKTVGHQFRNSLHLLMETLNATTPHYVRCIKPNDFKFPFTFDEKRAVQQLRACGVLETIRISAAGFPSRWTYQEFFSRYRVLMKQKDVLSDRKQTCKNVLEKLILDKDKYQFGKTKIFFRAGQVAYLEKLRADKLRAACIRIQKTIRGWLLRKKYLRMRKAAITMQRYVRGYQARCYAKFLRRTKAATIIQKYWRMYVVRRRYKIRRAATIVLQSYLRGFLARNRYRKILREHKAVIIQKRVRGWLARTHYKRSMHAIIYLQCCFRRMMAKRELKKLKIEARSVERYKKLHIGMENKIMQLQRKVDEQNKDYKCLVEKLTNLEGIYNSETEKLRSDLERLQLSEEEAKVATGRVLSLQEEIAKLRKDLEQTRSEKKCIEEHADRYKQETEQLVSNLKEENTLLKQEKEALNHRIVQQAKEMTETMEKKLVEETKQLELDLNDERLRYQNLLNEFSRLEERYDDLKEEMTLMVHVPKPGHKRTDSTHSSNESEYIFSSEIAEMEDIPSRTEEPSEKKVPLDMSLFLKLQKRVTELEQEKQVMQDELDRKEEQVLRSKAKEEERPQIRGAELEYESLKRQELESENKKLKNELNELRKALSEKSAPEVTAPGAPAYRVLMEQLTSVSEELDVRKEEVLILRSQLVSQKEAIQPKDDKNTMTDSTILLEDVQKMKDKGEIAQAYIGLKETNRSSALDYHELNEDGELWLVYEGLKQANRLLESQLQSQKRSHENEAEALRGEIQSLKEENNRQQQLLAQNLQLPPEARIEASLQHEITRLTNENLDLMEQLEKQDKTVRKLKKQLKVFAKKIGELEVGQMENISPGQIIDEPIRPVNIPRKEKDFQGMLEYKKEDEQKLVKNLILELKPRGVAVNLIPGLPAYILFMCVRHADYLNDDQKVRSLLTSTINSIKKVLKKRGDDFETVSFWLSNTCRFLHCLKQYSGEEGFMKHNTSRQNEHCLTNFDLAEYRQVLSDLAIQIYQQLVRVLENILQPMIVSGMLEHETIQGVSGVKPTGLRKRTSSIADEGTYTLDSILRQLNSFHSVMCQHGMDPELIKQVVKQMFYIIGAITLNNLLLRKDMCSWSKGMQIRYNVSQLEEWLRDKNLMNSGAKETLEPLIQAAQLLQVKKKTDDDAEAICSMCNALTTAQIVKVLNLYTPVNEFEERVSVSFIRTIQMRLRDRKDSPQLLMDAKHIFPVTFPFNPSSLALETIQIPASLGLGFISRV

SEQ ID NO: 31 - DNA, 1851 bp, Homo sapiens
atggcggccgtggctgcagaggcggcagcgactgcagcgtcccccggggaggggggcgccggcgaggccgagccggagatggagcccatccccggcagtgaggccggcactgaccccctcccggtcacggccactgaagcgtctgtgccggatggcgagactgacgggcagcaatccgctcctcaggccgacgagccgccgctcccgccgccaccgccgccgccgggggagctcgcccgcagcccagaggcggtggggccggagctggaggctgaggagaaactgtccgttcgggtggcggagtcggcggcagccgcgcctcagggagggccggaacttccaccttctcctgcatcgccgccggagcagcccccggctcccgaggagcgcgaggagccgccgctgcctcagcccgtagccccggcgctcgtgccgccggcgggcggggactccacggtgtcgcaactgatcccgggctcggaggtgcgggtcacgctggaccacatcattgaggacgcgcttgtcgtgtcgttccgcttcggggagaagctcttctccggggtcctcatggatctgtccaaaagtactcttccaacccaagaggagattgaaaatcttcctgccttccctcgggaaaaactgactctgcgtctcttgctgggaagtggagcctttggagaagtgtatgaaggaacagcagtggacatcttaggagttggaagtggagaaatcaaagtagcagtgaagactttgaagaagggttccacagaccaggagaagattgaattcctgaaggaggcacatctgatgagcaaatttaatcatcccaacattctgaagcagcttggagtttgtctgctgaatgaaccccaatacattatcctggaactgatggagggaggagaccttcttacttatttgcgtaaagcccggatggcaacgttttatggtcctttactcaccttggttgaccttgtagacctgtgtgtagatatttcaaaaggctgtgtctacttggaacggatgcatttcattcacagggatctggcagctagaaattgccttgtttccgtgaaagactataccagtccacggatagtgaagattggagactttggactcgccagagacatctataaaaatgattactatagaaagagaggggaaggcctgctcccagttcggtggatggctccagaaagtttgatggatggaatcttcactactcaatctgatgtatggtcttttggaattctgatttgggagattttaactcttggtcatcagccttatccagctcattccaaccttgatgtgttaaactatgtgcaaacaggagggagactggagccaccaagaaattgtcctgatgatctgtggaatttaatgacccagtgctgggctcaagaacccgaccaaagacctacttttcatagaattcaggaccaacttcagttattcagaaattttttcttaaatagcatttataagtccagagatgaagcaaacaacagtggagtcataaatgaaagctttgaaggtgaagatggcgatgtgatttgtttgaattcagatgacattatgccagttgctttaatggaaacgaagaaccgagaagggttaaactatatggtacttgctacagaatgtggccaaggtgaagaaaagtctgagggtcctctaggctcccaggaatctgaatcttgtggtctgaggaaagaagagaaggaaccacatgcagacaaagatttctgccaagaaaaacaagtggcttactgcccttctggcaagcctgaaggcctgaactatgcctgtctcactcacagtggatatggagatgggtctgattaa

SEQ ID NO: 32 - protein, 616 aa, Homo sapiens
MAAVAAEAAATAASPGEGGAGEAEPEMEPIPGSEAGTDPLPVTATEASVPDGETDGQQSAPQADEPPLPPPPPPPGELARSPEAVGPELEAEEKLSVRVAESAAAAPQGGPELPPSPASPPEQPPAPEEREEPPLPQPVAPALVPPAGGDSTVSQLIPGSEVRVTLDHIIEDALVVSFRFGEKLFSGVLMDLSKSTLPTQEEIENLPAFPREKLTLRLLLGSGAFGEVYEGTAVDILGVGSGEIKVAVKTLKKGSTDQEKIEFLKEAHLMSKFNHPNILKQLGVCLLNEPQYIILELMEGGDLLTYLRKARMATFYGPLLTLVDLVDLCVDISKGCVYLERMHFIHRDLAARNCLVSVKDYTSPRIVKIGDFGLARDIYKNDYYRKRGEGLLPVRWMAPESLMDGIFTTQSDVWSFGILIWEILTLGHQPYPAHSNLDVLNYVQTGGRLEPPRNCPDDLWNLMTQCWAQEPDQRPTFHRIQDQLQLFRNFFLNSIYKSRDEANNSGVINESFEGEDGDVICLNSDDIMPVALMETKNREGLNYMVLATECGQGEEKSEGPLGSQESESCGLRKEEKEPHADKDFCQEKQVAYCPSGKPEGLNYACLTHSGYGDGSD

SEQ ID NO: 33 - DNA, 4016 bp, Homo sapiens
gcgctgtcgccgccgccgctgcagccggagttggaggagggagaagctaggaagaaaatggcggccgtggctgcagaggcggcagcgactgcagcgtcccccggggaggggggcgccggcgaggccgagccggagatggagcccatccccggcagtgaggccggcactgaccccctcccggtcacggccactgaagcgtctgtgccggatggcgagactgacgggcagcaatccgctcctcaggccgacgagccgccgctcccgccgccaccgccgccgccgggggagctcgcccgcagcccagaggcggtggggccggagctggaggctgaggagaaactgtccgttcgggtggcggagtcggcggcagccgcgcctcagggagggccggaacttccaccttctcctgcatcgccgccggagcagcccccggctcccgaggagcgcgaggagccgccgctgcctcagcccgtagccccggcgctcgtgccgccggcgggcggggactccacggtgtcgcaactgatcccgggctcggaggtgcgggtcacgctggaccacatcattgaggacgcgcttgtcgtgtcgttccgcttcggggagaagctcttctccggggtcctcatggatctgtccaaaaggtttgggccccatggtatccctgtgacagtatttcccaaaagggaatataaggataaaccagaagccatgccgctccaaagtaatacattccaagaagggacagaagtcaagtgtgaagcaaatggtgctgttcccgatgacccttctcctgtcccgcatcccgagctgagcttggctgaaagcctgtggacttccaaaccaccacctctcttccatgaaggagcaccttatcctccccctttgtttatcagggacacatataaccaatcaatacctcagccacctcctcggaaaattaagcgacccaaacgaaaaatgtacagggaagaacccacttcaataatgaatgctattaaactacgacccaggcaagttctgtgtgataaatgtaaaaacagtgttgttgctgaaaaaaaggaaattagaaaaggtagtagtgcaactgactcttctaaatatgaagataaaaaacggagaaatgaaagtgtaactactgtgaacaaaaaactgaaaactgaccataaagtggatgggaaaaaccaaaatgaaagccagaaaagaaatgctgtggttaaggtttcaaatattgctcacagcagaggcagagtagtaaaagtttctgctcaggcaaatacatcaaaagctcagttaagtactaaaaaagttctccagagtaagaacatggatcatgcgaaagctcgggaagtgttaaaaattgccaaagaaaaggcacaaaagaagcaaaatgaaacctctacttccaaaaatgcacattcaaaagtccatttcacacgtcgatatcagaatcctagctcaggttcccttccaccccgggttcgtttaaaaccacagaggtacaggaatgaagaaaatgactcttctctgaagacaggacttgagaaaatgcggagtggcaagatggcacccaagccccagtctcgctgcacctctacccgctcagcaggtctcaacaaatggcagctattacatcagacagtgacgagtcctgctgctcccttacagtgtctgacagaccactgtggattcagactgggagcattgaagttaacagtgaaacgggcagcacaaagacattagcaggctgctggtttcatggacctgtaccacaatgacacagagaacaccagagcatcaggactgaatgaaattggagtttttaaagctgcactaagaagtaaatgttaaggcagtggttaaaaacaacagtctataaaggggcacttgcaaattgtgctgtcttaaaccgaagaaaaggtattagggaatattttataaaaaataaacttgcaataaattatgcatgagatgaggagaaaaatgatgtgaattacacacgtaagaactcacttgaattttatatatgaagaaacactgacagtaacttctttggaatgtgaagttcttatcagtacagtttggacaggcctaaaaggcatgggatgatgcagaaatgctgaattatttttcatacttaaactttgtgctttctccaaggtttaggttaatcagttcagatatgagcaaaggtatttctaaaatggctcttctatgaaaagcaatagtcacatatgccaaggccaatgtttccttcaaggtgccagtagaaacaacagaaaataacatcctgctgaaaggatggcaaagtgccccgccccaccccacaaacacaatttggatcttttccttctttaataaagcagggctgtattatcttgaatatatgtttgcttgttagaacatattaagatatatttatttgccactagtatttaacattttgtgcacattttcataattacattcttacctttcaaattttgactcaaagtggataggctagtgttgatattggagtgcaaatgtatatactccaagagctagttcttaattctgctgagttggaaagccttttattattgtctgtatccttactggttttatctagttcaaaaaaggtgacaacgtctaaattttgatgtggacctctctccatagagagccgctcctaagtgcaagaaattccaacaggtgtcagtaggacttggccctgggggacaacaagtggcaggaacaggatcctttaaaacagtgtcaaacttctcatgcatggagcatgaattcttactaatagagactgtagtttttttcttgtctttggtaaatatataaaagaccttaatttttcttttttaatgaatggagaaaacatgagaaaaccagatggacctgttagtactacatttttaaggcattttatatttgatggtgccgtacttttaataataataaaactgaagttttttagtggcaatactgatttattttttaaaccagaaagataatccatattgattacttactacaaaaaagggaaaatatgccaaaaaataaaaaaccttaaaattcatatgaagcaacgtaacagataactgagcacttggctcaagtggtcagacttttcataatgttactgtgtaagtttggaattacctaataaccccaggctcaggattaacagaaggttctgggtgagttttaaaacatttaatatacctatgatttgttttacaacttgaagaaaaggcaggcagtcttgtgtctaatgagcttaatgcaaattctaattatactgcaaataatttaaagttttgattgcattctacaattgtctgtttggaaaattacatattatgaagtcattatatattttatcaaatcagaaaaagtcagctcaggaactgtagcagcagggagttctaaagatgacatgaactatactataggggtgccctactctatatggcctagggctttggtttgggtcagtcttgttctttcagatacataacaccagcagtactttcgggctcacttcaagaaccagataactctcccaaaccatgatacatgaagtgtataatcaagatttttaattaagctttagaattctttatttgtgtagagtgatggaaatgaccaagaagtaataatataaagcaaaagaattgggagagatcaggttttaagtatataaatattttttttttctcatggcatattctcaaaggtgttttgttacaaaccagattttcattttttaaaaaatgagacttggtggtatttaaaacctacacctaccatgttgctatttcactttcattgctttagttgcttaatatttaagctttgcttcatgctaccttttgtctgtatttcaatcttcataagcctattttgttttgtagacttgaatgataaaaattgtttctcatcttaagtatgctcagagttttaaatgttaaagaatgttgtgtaacctttatccaataaagtctttgattttttaaaaaaaa

SEQ ID NO: 34 - protein, 560 aa, Homo sapiens
MAAVAAEAAATAASPGEGGAGEAEPEMEPIPGSEAGTDPLPVTATEASVPDGETDGQQSAPQADEPPLPPPPPPPGELARSPEAVGPELEAEEKLSVRVAESAAAAPQGGPELPPSPASPPEQPPAPEEREEPPLPQPVAPALVPPAGGDSTVSQLIPGSEVRVTLDHIIEDALVVSFRFGEKLFSGVLMDLSKRFGPHGIPVTVFPKREYKDKPEAMPLQSNTFQEGTEVKCEANGAVPDDPSPVPHPELSLAESLWTSKPPPLFHEGAPYPPPLFIRDTYNQSIPQPPPRKIKRPKRKMYREEPTSIMNAIKLRPRQVLCDKCKNSVVAEKKEIRKGSSATDSSKYEDKKRRNESVTTVNKKLKTDHKVDGKNQNESQKRNAVVKVSNIAHSRGRVVKVSAQANTSKAQLSTKKVLQSKNMDHAKAREVLKIAKEKAQKKQNETSTSKNAHSKVHFTRRYQNPSSGSLPPRVRLKPQRYRNEENDSSLKTGLEKMRSGKMAPKPQSRCTSTRSAGLNKWQLLHQTVTSPAAPLQCLTDHCGFRLGALKLTVKRAAQRH

SEQ ID NO: 35 - DNA, 2532 bp, Homo sapiens
atggccgtcatggcgccccgaaccctcctcctgctactctcgggggccctggccctgacccagacctgggcgggctcccactccatgaggtatttcttcacatccgtgtcccggcccggccgcggggagccccgcttcatcgccgtgggctacgtggacgacacgcagttcgtgcggttcgacagcgacgccgcgagccagaggatggagccgcgggcgccgtggatagagcaggaggggccggagtattgggaccaggagacacggaatgtgaaggcccagtcacagactgaccgagtggacctggggaccctgcgcggctactacaaccagagcgaggccggttctcacaccatccagataatgtatggctgcgacgtggggtcggacgggcgcttcctccgcgggtaccggcaggacgcctacgacggcaaggattacatcgccctgaacgaggacctgcgctcttggaccgcggcggacatggcggctcagatcaccaagcgcaagtgggaggcggcccatgaggcggagcagttgagagcctacctggatggcacgtgcgtggagtggctccgcagatacctggagaacgggaaggagacgctgcagcgcacggacccccccaagacacatatgacccaccaccccatctctgaccatgaggccaccctgaggtgctgggccctgggcttctaccctgcggagatcacactgacctggcagcgggatggggaggaccagacccaggacacggagctcgtggagaccaggcctgcaggggatggaaccttccagaagtgggcggctgtggtggtgccttctggagaggagcagagatacacctgccatgtgcagcatgagggtctgcccaagcccctcaccctgagatgggagctgtcttcccagcccaccatccccatcgtgggcatcattgctggcctggttctccttggagctgtgatcactggagctgtggtcgctgccgtgatgtggaggaggaagagctcagatagaaaaggagggagttacactcaggctgcaaatgatttttggataccagaaacaagtttcatacttactattatagttggaatatttctggttgttacaatcccactgacctttgtctggcatagaagattaaagaatcaaaaaagtgccaaggaaggggtgacagtgcttataaacgaagacaaagagttggctgagctgcgaggtctggcagccggagtaggcctggctaatgcctgctatgcaatacatactcttccaacccaagaggagattgaaaatcttcctgccttccctcgggaaaaactgactctgcgtctcttgctgggaagtggagcctttggagaagtgtatgaaggaacagcagtggacatcttaggagttggaagtggagaaatcaaagtagcagtgaagactttgaagaagggttccacagaccaggagaagattgaattcctgaaggaggcacatctgatgagcaaatttaatcatcccaacattctgaagcagcttggagtttgtctgctgaatgaaccccaatacattatcctggaactgatggagggaggagaccttcttacttatttgcgtaaagcccggatggcaacgttttatggtcctttactcaccttggttgaccttgtagacctgtgtgtagatatttcaaaaggctgtgtctacttggaacggatgcatttcattcacagggatctggcagctagaaattgccttgtttccgtgaaagactataccagtccacggatagtgaagattggagactttggactcgccagagacatctataaaaatgattactatagaaagagaggggaaggcctgctcccagttcggtggatggctccagaaagtttgatggatggaatcttcactactcaatctgatgtatggtcttttggaattctgatttgggagattttaactcttggtcatcagccttatccagctcattccaaccttgatgtgttaaactatgtgcaaacaggagggagactggagccaccaagaaattgtcctgatgatctgtggaatttaatgacccagtgctgggctcaagaacccgaccaaagacctacttttcatagaattcaggaccaacttcagttattcagaaattttttcttaaatagcatttataagtccagagatgaagcaaacaacagtggagtcataaatgaaagctttgaaggtgaagatggcgatgtgatttgtttgaattcagatgacattatgccagttgctttaatggaaacgaagaaccgagaagggttaaactatatggtacttgctacagaatgtggccaaggtgaagaaaagtctgagggtcctctaggctcccaggaatctgaatcttgtggtctgaggaaagaagagaaggaaccacatgcagacaaagatttctgccaagaaaaacaagtggcttactgcccttctggcaagcctgaaggcctgaactatgcctgtctcactcacagtggatatggagatgggtctgattaa

SEQ ID NO: 36 - protein, 843 aa, Homo sapiens
MAVMAPRTLLLLLSGALALTQTWAGSHSMRYFFTSVSRPGRGEPRFIAVGYVDDTQFVRFDSDAASQRMEPRAPWIEQEGPEYWDQETRNVKAQSQTDRVDLGTLRGYYNQSEAGSHTIQIMYGCDVGSDGRFLRGYRQDAYDGKDYIALNEDLRSWTAADMAAQITKRKWEAAHEAEQLRAYLDGTCVEWLRRYLENGKETLQRTDPPKTHMTHHPISDHEATLRCWALGFYPAEITLTWQRDGEDQTQDTELVETRPAGDGTFQKWAAVVVPSGEEQRYTCHVQHEGLPKPLTLRWELSSQPTIPIVGIIAGLVLLGAVITGAVVAAVMWRRKSSDRKGGSYTQAANDFWIPETSFILTIIVGIFLVVTIPLTFVWHRRLKNQKSAKEGVTVLINEDKELAELRGLAAGVGLANACYAIHTLPTQEEIENLPAFPREKLTLRLLLGSGAFGEVYEGTAVDILGVGSGEIKVAVKTLKKGSTDQEKIEFLKEAHLMSKFNHPNILKQLGVCLLNEPQYIILELMEGGDLLTYLRKARMATFYGPLLTLVDLVDLCVDISKGCVYLERMHFIHRDLAARNCLVSVKDYTSPRIVKIGDFGLARDIYKNDYYRKRGEGLLPVRWMAPESLMDGIFTTQSDVWSFGILIWEILTLGHQPYPAHSNLDVLNYVQTGGRLEPPRNCPDDLWNLMTQCWAQEPDQRPTFHRIQDQLQLFRNFFLNSIYKSRDEANNSGVINESFEGEDGDVICLNSDDIMPVALMETKNREGLNYMVLATECGQGEEKSEGPLGSQESESCGLRKEEKEPHADKDFCQEKQVAYCPSGKPEGLNYACLTHSGYGDGSD

SEQ ID NO: 37 - DNA, 1636 bp, Homo sapiens
gagaagccaatcagtgtcgtcgcggtcgctgttctaaagcccgcacgcacccaccgggactcagattctccccagacgccgaggatggccgtcatggcgccccgaaccctcctcctgctactctcgggggccctggccctgacccagacctgggcgggctcccactccatgaggtatttcttcacatccgtgtcccggcccggccgcggggagccccgcttcatcgccgtgggctacgtggacgacacgcagttcgtgcggttcgacagcgacgccgcgagccagaggatggagccgcgggcgccgtggatagagcaggaggggccggagtattgggaccaggagacacggaatgtgaaggcccagtcacagactgaccgagtggacctggggaccctgcgcggctactacaaccagagcgaggccggttctcacaccatccagataatgtatggctgcgacgtggggtcggacgggcgcttcctccgcgggtaccggcaggacgcctacgacggcaaggattacatcgccctgaacgaggacctgcgctcttggaccgcggcggacatggcggctcagatcaccaagcgcaagtgggaggcggcccatgaggcggagcagttgagagcctacctggatggcacgtgcgtggagtggctccgcagatacctggagaacgggaaggagacgctgcagcgcacggacccccccaagacacatatgacccaccaccccatctctgaccatgaggccaccctgaggtgctgggccctgggcttctaccctgcggagatcacactgacctggcagcgggatggggaggaccagacccaggacacggagctcgtggagaccaggcctgcaggggatggaaccttccagaagtgggcggctgtggtggtgccttctggagaggagcagagatacacctgccatgtgcagcatgagggtctgcccaagcccctcaccctgagatgggagctgtcttcccagcccaccatccccatcgtgggcatcattgctggcctggttctccttggagctgtgatcactggagctgtggtcgctgccgtgatgtggaggaggaagagctcagatagaaaaggagggagttacactcaggctgcaagcagtgacagtgcccagggctctgatgtgtccctcacagcttgtaaagtgtgagacagctgccttgtgtgggactgagaggcaagagttgttcctgcccttccctttgtgacttgaagaaccctgactttgtttctgcaaaggcacctgcatgtgtctgtgttcgtgtaggcataatgtgaggaggtggggagaccaccccacccccatgtccaccatgaccctcttcccacgctgacctgtgctccctccccaatcatctttcctgttccagagaggtggggctgaggtgtctccatctctgtctcaacttcatggtgcactgagctgtaacttcttccttccctattaaaattagaaccttagtataaatttactttctcaaattcttgccatgagaggttgatgagttaattaaaggagaagattcctaaaatttgagagacaaaataaatggaagacatgagaaccttccagagtccaaaaaaaaaaaaaaaaaaaaaaaaaa

SEQ ID NO: 38 - protein, 365 aa, Homo sapiens
MAVMAPRTLLLLLSGALALTQTWAGSHSMRYFFTSVSRPGRGEPRFIAVGYVDDTQFVRFDSDAASQRMEPRAPWIEQEGPEYWDQETRNVKAQSQTDRVDLGTLRGYYNQSEAGSHTIQIMYGCDVGSDGRFLRGYRQDAYDGKDYIALNEDLRSWTAADMAAQITKRKWEAAHEAEQLRAYLDGTCVEWLRRYLENGKETLQRTDPPKTHMTHHPISDHEATLRCWALGFYPAEITLTWQRDGEDQTQDTELVETRPAGDGTFQKWAAVVVPSGEEQRYTCHVQHEGLPKPLTLRWELSSQPTIPIVGIIAGLVLLGAVITGAVVAAVMWRRKSSDRKGGSYTQAASSDSAQGSDVSLTACKV

SEQ ID NO: 39 - DNA, 3534 bp, Homo sapiens
atgtatggaagtgcccgctctgttgggaaggtggagccgagcagccagagccctgggcgttcacccaggcttccacgttcccctcgcttgggtcaccgtcgaaccaacagtacgggagggagttcgggaagcagtgttggaggtggcagtgggaaaaccctttcaatggaaaatatacaatctttaaatgctgcctatgccacctctggccctatgtatctaagtgaccatgaaaatgtgggttcagaaacacctaaaagcaccatgacacttggccgttctgggggacgtctgccttacggtgttcggatgactgctatgggtagtagccccaatatagctagcagtggggttgctagtgacaccatagcatttggagagcatcacctccctcctgtgagtatggcatccactgtacctcactcccttcgtcaggcgagagataacacaatcatggatctgcagacacagctgaaggaagtattaagagaaaatgatctcttgcggaaggatgtggaagtaaaggagagcaaattgagttcttcaatgaatagcatcaagaccttctggagcccagagctgaagaaggaacgagccctgagaaaagatgaagcttccaaaatcaccatttggaaggaacagtacagagttgtacaggaggaaaaccagcacatgcagatgacaatccaggctctccaggatgaattgcggatccagagggacctgaatcagctgtttcagcaggatagtagcagcaggactggcgaaccttgtgtagcagagctgacagaggagaactttcagaggcttcatgctgagcatgagcggcaggccaaagagctgtttcttcttcgaaagacattggaggaaatggagctgcgtattgagactcaaaagcagaccctaaatgctcgggatgaatccattaagaagcttctggaaatgttgcagagcaaaggactttctgccaaggctaccgaggaagaccatgagagaacaagacgactggcagaggcagagatgcacgttcatcacctagaaagccttttggagcagaaggaaaaagagaacagtatgttgagagaggagatgcatcgaaggtttgagaatgctcctgattctgccaaaacaaaagctctgcaaactgttattgagatgaaggattcaaaaatttcctctatggagcgtgggcttcgagacctggaagaggaaattcagatgctgaaatcgaatggtgctttgagtactgaggaaagggaagaagaaatgaagcaaatggaagtgtatcggagccattctaaatttatgaaaaataagattggccaggtgaaacaggagctgtccagaaaggacacagaactactcgccctgcagacaaagctagaaacactcacaaaccagttctcagatagtaaacagcacattgaagtgttgaaggagtccttgactgctaaggagcagagggctgccatcctgcagactgaggtggatgctctccgattgcgtttggaagagaaggaaaccatgttgaataaaaagacaaaacaaattcaggatatggctgaagagaaggggacacaagctggagagatacatgacctcaaggacatgttggatgtgaaggagcggaaggttaatgttcttcagaagaagattgaaaatcttcaagagcagcttagagacaaggaaaagcagatgagcagcttgaaagaacgggtcaaatccttgcaggctgacaccaccaacactgacactgccttgacaactttggaggaggcccttgcagagaaagagcggacaattgaacgcttaaaggagcagagggacagagatgagcgagagaagcaagaggaaattgataactacaaaaaagatcttaaagacttgaaggaaaaagtcagcctgttgcaaggcgacctttcagagaaagaggcttcacttttggatctgaaagagcatgcttcttctctggcatcctcaggactgaaaaaggactcacggcttaagacactagagattgctttggagcagaagaaggaggagtgtctgaaaatggaatcacaattgaaaaaggcacatgaggcagcattggaagccagagccagtccagagatgagtgaccgaatacagcacttggagagagagatcaccaggtacaaagatgaatctagcaaggcccaggcagaagttgatcgactcttagaaatcttgaaggaggtggaaaatgagaagaatgacaaagataagaagatagctgagttggaaagtactcttccaacccaagaggagattgaaaatcttcctgccttccctcgggaaaaactgactctgcgtctcttgctgggaagtggagcctttggagaagtgtatgaaggaacagcagtggacatcttaggagttggaagtggagaaatcaaagtagcagtgaagactttgaagaagggttccacagaccaggagaagattgaattcctgaaggaggcacatctgatgagcaaatttaatcatcccaacattctgaagcagcttggagtttgtctgctgaatgaaccccaatacattatcctggaactgatggagggaggagaccttcttacttatttgcgtaaagcccggatggcaacgttttatggtcctttactcaccttggttgaccttgtagacctgtgtgtagatatttcaaaaggctgtgtctacttggaacggatgcatttcattcacagggatctggcagctagaaattgccttgtttccgtgaaagactataccagtccacggatagtgaagattggagactttggactcgccagagacatctataaaaatgattactatagaaagagaggggaaggcctgctcccagttcggtggatggctccagaaagtttgatggatggaatcttcactactcaatctgatgtatggtcttttggaattctgatttgggagattttaactcttggtcatcagccttatccagctcattccaaccttgatgtgttaaactatgtgcaaacaggagggagactggagccaccaagaaattgtcctgatgatctgtggaatttaatgacccagtgctgggctcaagaacccgaccaaagacctacttttcatagaattcaggaccaacttcagttattcagaaattttttcttaaatagcatttataagtccagagatgaagcaaacaacagtggagtcataaatgaaagctttgaaggtgaagatggcgatgtgatttgtttgaattcagatgacattatgccagttgctttaatggaaacgaagaaccgagaagggttaaactatatggtacttgctacagaatgtggccaaggtgaagaaaagtctgagggtcctctaggctcccaggaatctgaatcttgtggtctgaggaaagaagagaaggaaccacatgcagacaaagatttctgccaagaaaaacaagtggcttactgcccttctggcaagcctgaaggcctgaactatgcctgtctcactcacagtggatatggagatgggtctgattaa

SEQ ID NO: 40 - protein, 1177 aa, Homo sapiens
MYGSARSVGKVEPSSQSPGRSPRLPRSPRLGHRRTNSTGGSSGSSVGGGSGKTLSMENIQSLNAAYATSGPMYLSDHENVGSETPKSTMTLGRSGGRLPYGVRMTAMGSSPNIASSGVASDTIAFGEHHLPPVSMASTVPHSLRQARDNTIMDLQTQLKEVLRENDLLRKDVEVKESKLSSSMNSIKTFWSPELKKERALRKDEASKITIWKEQYRVVQEENQHMQMTIQALQDELRIQRDLNQLFQQDSSSRTGEPCVAELTEENFQRLHAEHERQAKELFLLRKTLEEMELRIETQKQTLNARDESIKKLLEMLQSKGLSAKATEEDHERTRRLAEAEMHVHHLESLLEQKEKENSMLREEMHRRFENAPDSAKTKALQTVIEMKDSKISSMERGLRDLEEEIQMLKSNGALSTEEREEEMKQMEVYRSHSKFMKNKIGQVKQELSRKDTELLALQTKLETLTNQFSDSKQHIEVLKESLTAKEQRAAILQTEVDALRLRLEEKETMLNKKTKQIQDMAEEKGTQAGEIHDLKDMLDVKERKVNVLQKKIENLQEQLRDKEKQMSSLKERVKSLQADTTNTDTALTTLEEALAEKERTIERLKEQRDRDEREKQEEIDNYKKDLKDLKEKVSLLQGDLSEKEASLLDLKEHASSLASSGLKKDSRLKTLEIALEQKKEECLKMESQLKKAHEAALEARASPEMSDRIQHLEREITRYKDESSKAQAEVDRLLEILKEVENEKNDKDKKIAELESTLPTQEEIENLPAFPREKLTLRLLLGSGAFGEVYEGTAVDILGVGSGEIKVAVKTLKKGSTDQEKIEFLKEAHLMSKFNHPNILKQLGVCLLNEPQYIILELMEGGDLLTYLRKARMATFYGPLLTLVDLVDLCVDISKGCVYLERMHFIHRDLAARNCLVSVKDYTSPRIVKIGDFGLARDIYKNDYYRKRGEGLLPVRWMAPESLMDGIFTTQSDVWSFGILIWEILTLGHQPYPAHSNLDVLNYVQTGGRLEPPRNCPDDLWNLMTQCWAQEPDQRPTFHRIQDQLQLFRNFFLNSIYKSRDEANNSGVINESFEGEDGDVICLNSDDIMPVALMETKNREGLNYMVLATECGQGEEKSEGPLGSQESESCGLRKEEKEPHADKDFCQEKQVAYCPSGKPEGLNYACLTHSGYGDGSD

SEQ ID NO: 41 - DNA, 9229 bp, Homo sapiens
gtgctgtggcggcggcggcggcggtagtggcggcggcggcggtgcctgggcggcagcagcagcagtagcggcagccctgaggacgatatggtgtaagatacttcttcaagattggacagctggggaccttcttctgattaaccttaaaccaacttgtagccatagagacacctcacaaggttcccatttttgttgttgttgttgttgattttctgctcacacctttcctgaccttgcaaccatgtatggaagtgcccgctctgttgggaaggtggagccgagcagccagagccctgggcgttcacccaggcttccacgttcccctcgcttgggtcaccgtcgaaccaacagtacgggagggagttcgggaagcagtgttggaggtggcagtgggaaaaccctttcaatggaaaatatacaatctttaaatgctgcctatgccacctctggccctatgtatctaagtgaccatgaaaatgtgggttcagaaacacctaaaagcaccatgacacttggccgttctgggggacgtctgccttacggtgttcggatgactgctatgggtagtagccccaatatagctagcagtggggttgctagtgacaccatagcatttggagagcatcacctccctcctgtgagtatggcatccactgtacctcactcccttcgtcaggcgagagataacacaatcatggatctgcagacacagctgaaggaagtattaagagaaaatgatctcttgcggaaggatgtggaagtaaaggagagcaaattgagttcttcaatgaatagcatcaagaccttctggagcccagagctgaagaaggaacgagccctgagaaaagatgaagcttccaaaatcaccatttggaaggaacagtacagagttgtacaggaggaaaaccagcacatgcagatgacaatccaggctctccaggatgaattgcggatccagagggacctgaatcagctgtttcagcaggatagtagcagcaggactggcgaaccttgtgtagcagagctgacagaggagaactttcagaggcttcatgctgagcatgagcggcaggccaaagagctgtttcttcttcgaaagacattggaggaaatggagctgcgtattgagactcaaaagcagaccctaaatgctcgggatgaatccattaagaagcttctggaaatgttgcagagcaaaggactttctgccaaggctaccgaggaagaccatgagagaacaagacgactggcagaggcagagatgcacgttcatcacctagaaagccttttggagcagaaggaaaaagagaacagtatgttgagagaggagatgcatcgaaggtttgagaatgctcctgattctgccaaaacaaaagctctgcaaactgttattgagatgaaggattcaaaaatttcctctatggagcgtgggcttcgagacctggaagaggaaattcagatgctgaaatcgaatggtgctttgagtactgaggaaagggaagaagaaatgaagcaaatggaagtgtatcggagccattctaaatttatgaaaaataagattggccaggtgaaacaggagctgtccagaaaggacacagaactactcgccctgcagacaaagctagaaacactcacaaaccagttctcagatagtaaacagcacattgaagtgttgaaggagtccttgactgctaaggagcagagggctgccatcctgcagactgaggtggatgctctccgattgcgtttggaagagaaggaaaccatgttgaataaaaagacaaaacaaattcaggatatggctgaagagaaggggacacaagctggagagatacatgacctcaaggacatgttggatgtgaaggagcggaaggttaatgttcttcagaagaagattgaaaatcttcaagagcagcttagagacaaggaaaagcagatgagcagcttgaaagaacgggtcaaatccttgcaggctgacaccaccaacactgacactgccttgacaactttggaggaggcccttgcagagaaagagcggacaattgaacgcttaaaggagcagagggacagagatgagcgagagaagcaagaggaaattgataactacaaaaaagatcttaaagacttgaaggaaaaagtcagcctgttgcaaggcgacctttcagagaaagaggcttcacttttggatctgaaagagcatgcttcttctctggcatcctcaggactgaaaaaggactcacggcttaagacactagagattgctttggagcagaagaaggaggagtgtctgaaaatggaatcacaattgaaaaaggcacatgaggcagcattggaagccagagccagtccagagatgagtgaccgaatacagcacttggagagagagatcaccaggtacaaagatgaatctagcaaggcccaggcagaagttgatcgactcttagaaatcttgaaggaggtggaaaatgagaagaatgacaaagataagaagatagctgagttggaaaggcaagtgaaagaccagaataagaaggtagcaaatctgaagcacaaggaacaggtggaaaaaaagaagagtgcacaaatgttagaggaggcgcgacgacgggaggacaatctcaacgacagctctcagcagctacaggacagtctccgtaagaaggatgacaggattgaagagctggaagaagcactaagagaaagtgtacagataactgcagagcgggaaatggtgctagcacaagaggaatcagccaggaccaatgctgaaaaacaggtggaggagttactgatggccatggagaaggtaaagcaggaactagaatccatgaaagcaaagctgtcctccacccagcagtctctggcagaaaaggaaactcacttgactaatcttcgggcagagagaaggaaacacttagaggaagttctggagatgaagcaagaagctcttctggctgccattagtgaaaaagacgccaatatagctctcttggagctttcgtcctctaagaagaagacccaagaggaagtggctgccctgaagcgggagaaggatcgtctggtacagcagcttaagcagcagacgcaaaatcgaatgaagctaatggccgacaactacgaggatgaccacttcaaatcctcccattccaatcaaacaaatcacaagccctccccagaccagatcatccagcccctcttagaacttgaccaaaatagaagtaaattaaagttgtacattggacacctgacaaccctctgccatgaccgagaccccctgatcctccgtggactcactccaccagcttcctataacttggacgatgaccaggcggcttgggagaatgagctgcagaagatgacccgggggcagcttcaggatgagttagagaaaggtgaacgggacaatgcagaactgcaggagtttgccaacgccattcttcagcagatagcagaccattgtcccgacatcctagagcaagtggtcaacgccctggaagagtcctcttgaccctgctttatggggaagcctgaggtagtcaacccaggagccaagaaaagagaactacgaggaacaggtgcccggaaccttcttggcaccaaacactacaaacttcatcccaacttgctcacttgaagaagtgtgattccagcaccgtttctacatctgccatcttactctgcctttctgctttggatgtggtctctacactaaccttcttgatgtccagggtagataaagggtcgaatctctctgaagaactgccacctggtcatcagcagtggagaactgtgggagctggtggctctgccctgacagagagccatggagcagaggagcctctcacctcctgtcctctgacatgagaatgaaaccaggaatggacttggagttcaacaggctgagaggatgcctccaatggaccagagagctgagtgttctaatatcacaataggtgctttctcctaaaagggcaaaaaacaatctcaaaaagattagaaaaagagaaggggggaagggaagagaaaatcgactcttctttttactgtctcttctgcttactttccacatgagatgctttgtaccggggagctgtgagcaggcctcacgatggcttgggagcactcgttctcccaaggtctgagtcttcatccagccctgcctgtctgtcgcagccttcctcactctgttcctcggccagttaacaagaagatggtgtgaggtgttctccaccagtctctcctgtttgagactgttgacgttatcatactgaggtgttagatcaaatatctctaattgaagaacatgtgaggttgaaagagcaccagccagggcaacatagcgtgaccctgtctctacaaaaaattaaaaagagaacatacaaagttgacatatgagaccctgttgtccccgcctgcagctttgccccagtaacagatgcccgttgctcttgggctggtttcccctgaacacctccaagaggctgcctgccttgccagcacccgtgtcctgagctcctgcagcccagtggctgctgaagttgtgatccctcactcaccctgctagctttgcccttgactcgtcttctctgaacctcagcctcgtgcattgcctggaaccttcttctagcataaatgaaggtttttcctcctacacacattccttcctcggttatttcattcagagaatatttatgaaatgcctactgtgtgcaagtcatccatccttgaaaaggccacttctcagtgagggagagatgtagtggattctgtgagacatacctgctggagttgaagcagtaaatagcatgtccttcccctccccgatcttaaggtgtgttttctagaaaagttccctaatggaattcatgagtttgggggtctcagtcacccgcttgcctgtaggattccatttgatgattctggatttttgctgtttgttattgcccttagaggggctctgagtatctacttgtgggtggccatttcctgacatctgcatgtacctcgtggaattcagccagcttcatgttgcaaatcagaaagctgaccccaagactgcaaatcaatgaaggtattggcattgttaaggacgtagcgtagacaacagcagtcataaataattaggcaggaacttaacccaaatctagttctttgaccacctctaccaccagaacccagcagacactcacatctcctgataagagttgctggactcgatgtttttgttttgcattttctcctctccttccccacttactcagagaatttaaagtctgtagagtcagcacagccccatcagtccaggaacttcccaccaccagcccttgactgtcccattaactgacatggtcagatttccagctccccctactccctgctgtgaaacaatccctctccctgtgagaggaaactgtggagcgtttcttatcgaaggttaaatggactctgctcataaacctcttactgagatgcttcctgatagccaggctggccagagaggggtgcaggggttagatagtaagtggtggtcgtttgtggtcagttacctcaattctgttcattgcagtgcccgtaaaccatgtagaaagctcccagcactgaaaggcaggagtgttagcatctcgctttatccaccataacgtaaagaactgcggtgtgataacagccttcacggggccacggtggaaccaagacagcaggcgaggccatgcctaaacaagtggtctggcacgggcactggccagctgctctctccaagcaggtggcccagatcccacccacgtggactttctcatcaggtgcagcgcctgccactctcagccactgggtgtgtcactctcctcttcatctcagcattctccatcacttcccctccagaaaaacggatggaaggaagccctctgtgacactgcttctgagaagaagcatttccgggaccgatatcatctgtctggtctctgtgaacagcaaggaatcttcttgaccgttcttgggcactggaggctggctaggagttcagtaataaacgtggccttcgtgctgtagggcagagtggatgcagtttgtagctttcagagtgtctcattgagtctagatcattgaaccaacacttaaccaaatgtcccactcccatcacactaggacttgtcattccatgcccctctcctagtggtcatggtttcatatgggcatacaactgctactgaagttatatagccttgaaaactcagtgcaggttgcccttaattttccccaaacccctccatcggcaagtctagttgccctttagcacctaaagatctgcaccccaaaccaatgtcaccataaagagggcacgaagaagagtgggtgtgatcccaacggggttttgtaactgaagaagcccagtgtgagcttctcatcttttcatatacctctaacccccggtactcattgaatcattgatgaggtatctcaattgagatttgcaaggactttgataccatttgaaatggaaaaattttgaacgggctttaacatgtttaagaaatatggatggggccggccacagtggctcacgcctgtaatcccagaactctggaaggctgaggcaggcggatcacctgagatcaggagttcgaggccagcctggccaagatggcaaaaaccccgactctactaaaaatacaaaattagccaggcgtggtggcgtacgcctgtaatcccagctactcaggaggcaggagaatcgcttgagcctgggaggcagaggctgcggtgagccgagatcgtgtcactgcactccagcctgggtgacagagactccatttaaaaaaaaaaaaaaaaaatatatatatatatatatatatatatatatggatgggaatcaccaaattcatctcagctctaaccttttaacctttgtccttgcactttacaatctaaagatctacctgtggctctcagacttcctcacacttgggttttagaaataacttgtaaagcagactggacccaaggccgccttcagtgtcaagaagggcattgtgacttgcccctcaatttctgtccattgaagtctggttttccatgaggaacttgcgggctcacccacccccagagtgagagaagaggaaggcgaagtcatcacagacacggtcttagccacctgctgaactaatccctccgctattgagggtcagggttgtgaggcaaccatcatgtgtcaccccaaaatataaatgtttctgagccgcccatccactggcatttggatttgctgccagagtcctgttcctcccagaaccatcccgccctcctgttgaccatgttacttgagtgtaggcccggtgtcaagaccctcagagtctttgaggaaagagccaagcagagaagaccgctgcgtggagtgtgacaccacatggcatttctcaagcccagcggaccctgtgtcagcaaataccagtaatttaacatctgctcctggcctcctcttcacctgcctgggttcggaactgaggaggaaggatgagaagagactgcaatgcagcaggcaccctctgcagagtgaggccgcccgtccatcactgccagccctgggctgctcaggaggggacgtgaaccactcaaaggaatgtcttaaagaggatctggagtttcccccatgcaaattagggaagaattaggcaagaaaagacatacattacagggaaatccttctgaacaaaatggctgtcttcacctactcttcttgcaagaaaagacatacattacagggaaatccttctgaacaaaatggctatcttcacctactcttcagcaaaaaccgtctccagactttttagtgtcaaaaatgtaaccaactgtctcctgattttttccaatgtgtttggcaagtgctgtggccctgttgtaggtacttctcctgactcttgggggagaagtggttttagggattgatttgggggagcgggtttttgtcccatcccacctcctctcttctttctctgcttgtcgatattgtctgtgtgattcagagaattggggcagttacattgtgtctgttgttgagattattaaaagattaaaacgtagttgtagaaatgaaaaattaaacagctgtgttttaaaaatgcaaaccaatatcttgttaataaaggaattcaagctatggggcagccacactcccctcctcccaggctggcataggtggccctgggctggcggcttaggaagcatggagcacacttagggtagtgcctgcctgggcaagagacacctgccgagcaaaaggaacgagaatctggggctcagagcctcgcagttgtgccaggattttcctatacatgttcaggacctctgggtagaggtttcacagtttgtgaccccataaccaccctcacccgacgtgggttctagctcagtgtgcctaatactgcatggtaacctgggcttgaccctgaagcccctgcctggcaggccacaggacctctcctgcccacttggtgctatctcttccagtgaccacccagcacgggtgagcactggccagcctggagcctgcaatccaggtggaacagactgtcctccatgtcagttccttctggcttcaggccctcaattatttccctttgagcttttttagaccctagatctcctaggcccaggctctctcttgaccccagagaagccactgtcaggaaaggaagtgaaccctactgaagccagagaattcaccccggccaaagcaggccctctgggtccagcccctcattccacaccacgccagtattgcatccatctactgcagctacacatcctgagggcagcaccacccactctggcctgctggcccatcgcaggactagcccaggcacctgccgggcattgcaggatatccagtggggcctgtgactgctccctgatgcgtcagaagagaagtgttgcactttagtggaggagctgaggagcacctgcccccttgtagcttgagttccttttggtaacagtagcagcctccatggtggtgtctgggatgcacgtgcacccgctgccttcagctgtatgtgtgtgttcctgctggagttgtgttactgacaggataatgacattacaaagaaattgtgttatattcaactttgccttgataattattgtaaacactttgttcattttttcttttttattcacaaactaaatccaccaggaaattataaagttatttaaaaaccgtaaaaaaaaaaaaaaaaaa

SEQ ID NO: 42 - protein, 1088 aa, Homo sapiens
MYGSARSVGKVEPSSQSPGRSPRLPRSPRLGHRRTNSTGGSSGSSVGGGSGKTLSMENIQSLNAAYATSGPMYLSDHENVGSETPKSTMTLGRSGGRLPYGVRMTAMGSSPNIASSGVASDTIAFGEHHLPPVSMASTVPHSLRQARDNTIMDLQTQLKEVLRENDLLRKDVEVKESKLSSSMNSIKTFWSPELKKERALRKDEASKITIWKEQYRVVQEENQHMQMTIQALQDELRIQRDLNQLFQQDSSSRTGEPCVAELTEENFQRLHAEHERQAKELFLLRKTLEEMELRIETQKQTLNARDESIKKLLEMLQSKGLSAKATEEDHERTRRLAEAEMHVHHLESLLEQKEKENSMLREEMHRRFENAPDSAKTKALQTVIEMKDSKISSMERGLRDLEEEIQMLKSNGALSTEEREEEMKQMEVYRSHSKFMKNKIGQVKQELSRKDTELLALQTKLETLTNQFSDSKQHIEVLKESLTAKEQRAAILQTEVDALRLRLEEKETMLNKKTKQIQDMAEEKGTQAGEIHDLKDMLDVKERKVNVLQKKIENLQEQLRDKEKQMSSLKERVKSLQADTTNTDTALTTLEEALAEKERTIERLKEQRDRDEREKQEEIDNYKKDLKDLKEKVSLLQGDLSEKEASLLDLKEHASSLASSGLKKDSRLKTLEIALEQKKEECLKMESQLKKAHEAALEARASPEMSDRIQHLEREITRYKDESSKAQAEVDRLLEILKEVENEKNDKDKKIAELERQVKDQNKKVANLKHKEQVEKKKSAQMLEEARRREDNLNDSSQQLQDSLRKKDDRIEELEEALRESVQITAEREMVLAQEESARTNAEKQVEELLMAMEKVKQELESMKAKLSSTQQSLAEKETHLTNLRAERRKHLEEVLEMKQEALLAAISEKDANIALLELSSSKKKTQEEVAALKREKDRLVQQLKQQTQNRMKLMADNYEDDHFKSSHSNQTNHKPSPDQIIQPLLELDQNRSKLKLYIGHLTTLCHDRDPLILRGLTPPASYNLDDDQAAWENELQKMTRGQLQDELEKGERDNAELQEFANAILQQIADHCPDILEQVVNALEESS

SEQ ID NO: 43 - DNA, 2466 bp, Homo sapiens
atgatggaggccatcaagaaaaagatgcagatgctgaagttagacaaggagaatgctctggatcgggcagagcaagctgaagctgagcagaagcaggcagaagaaagaagtaaacagctggaggatgagctggcagccatgcagaagaagctgaaagggacagaggatgagctggacaagtattctgaagctttgaaggatgcccaggagaagctggaactggcagagaagaaggctgctgatgctgaggctgaggtggcctccttgaaccgtaggatccagctggttgaagaagagctggaccgtgctcaggagcgcctggccactgccctgcaaaagctggaagaagctgaaaaagctgctgatgagagtgagagaggtatgaaggttattgaaaaccgggccttaaaagatgaagaaaagatggaactccaggaaatccaactcaaagaagctaagcacattgcagaagaggcagataggaagtatgaagaggtggctcgtaagttggtgatcattgaaggagacttggaacgcacagaggaacgagctgagctggcagagtctaagtgttctgagctggaggaggagctgaagaatgtcaccaacaacctcaagtctcttgaggctcaggcggagaagtactctcaaaaagaagataaatatgaggaagaaatcaagattcttactgataaactcaaggaggcagagacccgtgctgagtttgctgagagatcggtagccaagctggaaaagacaattgatgacctggaagtgtaccgccggaagcaccaggagctgcaagccatgcagatggagctgcagagccctgagtacaagctgagcaagctccgcacctcgaccatcatgaccgactacaaccccaactactgctttgctggcaagacctcctccatcagtgacctgaaggaggtgccgcggaaaaacatcaccctcattcggggtctgggccatggcgcctttggggaggtgtatgaaggccaggtgtccggaatgcccaacgacccaagccccctgcaagtggctgtgaagacgctgcctgaagtgtgctctgaacaggacgaactggatttcctcatggaagccctgatcatcagcaaattcaaccaccagaacattgttcgctgcattggggtgagcctgcaatccctgccccggttcatcctgctggagctcatggcggggggagacctcaagtccttcctccgagagacccgccctcgcccgagccagccctcctccctggccatgctggaccttctgcacgtggctcgggacattgcctgtggctgtcagtatttggaggaaaaccacttcatccaccgagacattgctgccagaaactgcctcttgacctgtccaggccctggaagagtggccaagattggagacttcgggatggcccgagacatctacagggcgagctactatagaaagggaggctgtgccatgctgccagttaagtggatgcccccagaggccttcatggaaggaatattcacttctaaaacagacacatggtcctttggagtgctgctatgggaaatcttttctcttggatatatgccataccccagcaaaagcaaccaggaagttctggagtttgtcaccagtggaggccggatggacccacccaagaactgccctgggcctgtataccggataatgactcagtgctggcaacatcagcctgaagacaggcccaactttgccatcattttggagaggattgaatactgcacccaggacccggatgtaatcaacaccgctttgccgatagaatatggtccacttgtggaagaggaagagaaagtgcctgtgaggcccaaggaccctgagggggttcctcctctcctggtctctcaacaggcaaaacgggaggaggagcgcagcccagctgccccaccacctctgcctaccacctcctctggcaaggctgcaaagaaacccacagctgcagagatctctgttcgagtccctagagggccggccgtggaagggggacacgtgaatatggcattctctcagtccaaccctccttcggagttgcacaaggtccacggatccagaaacaagcccaccagcttgtggaacccaacgtacggctcctggtttacagagaaacccaccaaaaagaataatcctatagcaaagaaggagccacacgacaggggtaacctggggctggagggaagctgtactgtcccacctaacgttgcaactgggagacttccgggggcctcactgctcctagagccctcttcgctgactgccaatatgaaggaggtacctctgttcaggctacgtcacttcccttgtgggaatgtcaattacggctaccagcaacagggcttgcccttagaagccgctactgcccctggagctggtcattacgaggataccattctgaaaagcaagaatagcatgaaccagcctgggccctga

SEQ ID NO: 44 - protein, 821 aa, Homo sapiens
MMEAIKKKMQMLKLDKENALDRAEQAEAEQKQAEERSKQLEDELAAMQKKLKGTEDELDKYSEALKDAQEKLELAEKKAADAEAEVASLNRRIQLVEEELDRAQERLATALQKLEEAEKAADESERGMKVIENRALKDEEKMELQEIQLKEAKHIAEEADRKYEEVARKLVIIEGDLERTEERAELAESKCSELEEELKNVTNNLKSLEAQAEKYSQKEDKYEEEIKILTDKLKEAETRAEFAERSVAKLEKTIDDLEVYRRKHQELQAMQMELQSPEYKLSKLRTSTIMTDYNPNYCFAGKTSSISDLKEVPRKNITLIRGLGHGAFGEVYEGQVSGMPNDPSPLQVAVKTLPEVCSEQDELDFLMEALIISKFNHQNIVRCIGVSLQSLPRFILLELMAGGDLKSFLRETRPRPSQPSSLAMLDLLHVARDIACGCQYLEENHFIHRDIAARNCLLTCPGPGRVAKIGDFGMARDIYRASYYRKGGCAMLPVKWMPPEAFMEGIFTSKTDTWSFGVLLWEIFSLGYMPYPSKSNQEVLEFVTSGGRMDPPKNCPGPVYRIMTQCWQHQPEDRPNFAIILERIEYCTQDPDVINTALPIEYGPLVEEEEKVPVRPKDPEGVPPLLVSQQAKREEERSPAAPPPLPTTSSGKAAKKPTAAEISVRVPRGPAVEGGHVNMAFSQSNPPSELHKVHGSRNKPTSLWNPTYGSWFTEKPTKKNNPIAKKEPHDRGNLGLEGSCTVPPNVATGRLPGASLLLEPSSLTANMKEVPLFRLRHFPCGNVNYGYQQQGLPLEAATAPGAGHYEDTILKSKNSMNQPGP

SEQ ID NO: 45 - DNA, 2574 bp, Homo sapiens
atgtcttggtttgttgatcttgctggaaaggcagaagatcttttaaaccgagttgatcaaggggctgcaacagctctcagtaggaaagacaatgccagcaacatatatagcaaaaatactgactatactgaacttcaccagcaaaatacagatttgatatatcagactggacctaaatctacgtatatttcatcagcagctgataacattcgaaatcaaaaagccaccatcttagctggcactgcaaatgtgaaagtaggatctcggacaccagtagaggcctctcatcctgttgaaaatgcatctgttcctaggccttcatcccattttgtgcgaagaaaaaagtcagaacctgatgatgagctgctgtttgattttcttaatagttcacagaaggagcctaccgggagggtggaaatcagaaaggaaaaaggcaagacacctgtctttcagagctctcagacatcaagtgtcagttctgtgaaccccagtgtaaccaccatcaaaaccattgaagaaaattcttttgggagccaaacccacgaagctgccagtaactcagattctagccatgaaggtcaagaggaatcttcaaaggaaaatgtgtcatcaaatgctgcctgccctgaccacaccccaacacctaatgatgatggcaaatcacatgaactgtctaaccttcgactggagaatcagctgctgaggaatgaagttcagtctttaaatcaagaaatggcctcgttactccaaagatccaaagagactcaagaagaattaaacaaagcaagagcaagagttgaaaagtggaatgctgaccattcaaagagtgatcgaatgactcgaggactccgagcccaagtagatgacctgactgaagctgtggctgcaaaggattcccagctggctgtactgaaagtgagactccaggaagctgaccagctactgagtactcgcacagaagcattagaagccttacagagtgaaaaatcacgaataatgcaggatcaaagtgaaggtaacagcctgcagaatcaagctctgcagacttttcaggagagactgcatgaagcggatgccactctgaagagagagcaggagagctataaacagatgcagagcgagtttgctgcacgccttaataaagtggaaatggaacgtcagaatttagcagaagcaattacactggccgaaagaaaatactcagatgagaagaagagggttgatgaactgcagcagcaagtcaagctgtataagttgaacttggagtcctctaagcaggaattaattgactacaagcaaaaagctactagaatactgcaatctaaggaaaaattgattaacagcttgaaagaaggctctggttttgaaggcctagatagcagcactgccagtagcatggagctggaagaacttcggcatgagaaagagatgcagagggaggaaatacagaagctgatgggccagatacatcagctcagatccgaattacaggaggatccaaagtgggaattccctcggaagaacttggttcttggaaaaactctaggagaaggcgaatttggaaaagtggtcaaggcaacggccttccatctgaaaggcagagcagggtacaccacggtggccgtgaagatgctgaaagagaacgcctccccgagtgagcttcgagacctgctgtcagagttcaacgtcctgaagcaggtcaaccacccacatgtcatcaaattgtatggggcctgcagccaggatggcccgctcctcctcatcgtggagtacgccaaatacggctccctgcggggcttcctccgcgagagccgcaaagtggggcctggctacctgggcagtggaggcagccgcaactccagctccctggaccacccggatgagcgggccctcaccatgggcgacctcatctcatttgcctggcagatctcacaggggatgcagtatctggccgagatgaagctcgttcatcgggacttggcagccagaaacatcctggtagctgaggggcggaagatgaagatttcggatttcggcttgtcccgagatgtttatgaagaggattcctacgtgaagaggagccagggtcggattccagttaaatggatggcaattgaatccctttttgatcatatctacaccacgcaaagtgatgtatggtcttttggtgtcctgctgtgggagatcgtgaccctagggggaaacccctatcctgggattcctcctgagcggctcttcaaccttctgaagaccggccaccggatggagaggccagacaactgcagcgaggagatgtaccgcctgatgctgcaatgctggaagcaggagccggacaaaaggccggtgtttgcggacatcagcaaagacctggagaagatgatggttaagaggagagactacttggaccttgcggcgtccactccatctgactccctgatttatgacgacggcctctcagaggaggagacaccgctggtggactgtaataatgcccccctccctcgagccctcccttccacatggattgaaaacaaactctatggtagaatttcccatgcatttactagattctag

SEQ ID NO: 46 - protein, 857 aa, Homo sapiens
MSWFVDLAGKAEDLLNRVDQGAATALSRKDNASNIYSKNTDYTELHQQNTDLIYQTGPKSTYISSAADNIRNQKATILAGTANVKVGSRTPVEASHPVENASVPRPSSHFVRRKKSEPDDELLFDFLNSSQKEPTGRVEIRKEKGKTPVFQSSQTSSVSSVNPSVTTIKTIEENSFGSQTHEAASNSDSSHEGQEESSKENVSSNAACPDHTPTPNDDGKSHELSNLRLENQLLRNEVQSLNQEMASLLQRSKETQEELNKARARVEKWNADHSKSDRMTRGLRAQVDDLTEAVAAKDSQLAVLKVRLQEADQLLSTRTEALEALQSEKSRIMQDQSEGNSLQNQALQTFQERLHEADATLKREQESYKQMQSEFAARLNKVEMERQNLAEAITLAERKYSDEKKRVDELQQQVKLYKLNLESSKQELIDYKQKATRILQSKEKLINSLKEGSGFEGLDSSTASSMELEELRHEKEMQREEIQKLMGQIHQLRSELQEDPKWEFPRKNLVLGKTLGEGEFGKVVKATAFHLKGRAGYTTVAVKMLKENASPSELRDLLSEFNVLKQVNHPHVIKLYGACSQDGPLLLIVEYAKYGSLRGFLRESRKVGPGYLGSGGSRNSSSLDHPDERALTMGDLISFAWQISQGMQYLAEMKLVHRDLAARNILVAEGRKMKISDFGLSRDVYEEDSYVKRSQGRIPVKWMAIESLFDHIYTTQSDVWSFGVLLWEIVTLGGNPYPGIPPERLFNLLKTGHRMERPDNCSEEMYRLMLQCWKQEPDKRPVFADISKDLEKMMVKRRDYLDLAASTPSDSLIYDDGLSEEETPLVDCNNAPLPRALPSTWIENKLYGRISHAFTRF

SEQ ID NO: 47 - DNA, 2891 bp, Homo sapiens
gcttcccttccacgtctcccggaagcggtagcagggccccggcgggtcggggaggaggtttactcagcttgggccccctccgggccagccgccgagggggcgcggcccaggacggcggctaggccgtagtgcagcctctccggagtcctcaggtttgccaataggattatcctgctgccatcatgtcttggtttgttgatcttgctggaaaggcagaagatcttttaaaccgagttgatcaaggggctgcaacagctctcagtaggaaagacaatgccagcaacatatatagcaaaaatactgactatactgaacttcaccagcaaaatacagatttgatatatcagactggacctaaatctacgtatatttcatcagcagctgataacattcgaaatcaaaaagccaccatcttagctggcactgcaaatgtgaaagtaggatctcggacaccagtagaggcctctcatcctgttgaaaatgcatctgttcctaggccttcatcccattttgtgcgaagaaaaaagtcagaacctgatgatgagctgctgtttgattttcttaatagttcacagaaggagcctaccgggagggtggaaatcagaaaggaaaaaggcaagacacctgtctttcagagctctcagacatcaagtgtcagttctgtgaaccccagtgtaaccaccatcaaaaccattgaagaaaattcttttgggagccaaacccacgaagctgccagtaactcagattctagccatgaaggtcaagaggaatcttcaaaggaaaatgtgtcatcaaatgctgcctgccctgaccacaccccaacacctaatgatgatggcaaatcacatgaactgtctaaccttcgactggagaatcagctgctgaggaatgaagttcagtctttaaatcaagaaatggcctcgttactccaaagatccaaagagactcaagaagaattaaacaaagcaagagcaagagttgaaaagtggaatgctgaccattcaaagagtgatcgaatgactcgaggactccgagcccaagtagatgacctgactgaagctgtggctgcaaaggattcccagctggctgtactgaaagtgagactccaggaagctgaccagctactgagtactcgcacagaagcattagaagccttacagagtgaaaaatcacgaataatgcaggatcaaagtgaaggtaacagcctgcagaatcaagctctgcagacttttcaggagagactgcatgaagcggatgccactctgaagagagagcaggagagctataaacagatgcagagcgagtttgctgcacgccttaataaagtggaaatggaacgtcagaatttagcagaagcaattacactggccgaaagaaaatactcagatgagaagaagagggttgatgaactgcagcagcaagtcaagctgtataagttgaacttggagtcctctaagcaggaattaattgactacaagcaaaaagctactagaatactgcaatctaaggaaaaattgattaacagcttgaaagaaggctctggttttgaaggcctagatagcagcactgccagtagcatggagctggaagaacttcggcatgagaaagagatgcagagggaggaaatacagaagctgatgggccagatacatcagctcagatccgaattacaggatatggaggcacagcaagttaatgaagcagaatcagcaagagaacagttacaggatctgcatgaccaaatagctgggcagaaagcatccaaacaagaactagagacagaactggagcgactgaagcaggagttccactatatagaagaagatctttatcgaacaaagaacacattgcaaagcagaattaaagatcgagacgaagaaattcaaaaactcaggaatcagcttaccaataaaactttaagcaatagcagtcagtctgagttagaaaatcgactccatcagctaacagagactctcatccagaaacagaccatgctggagagtctcagcacagaaaagaactccctggtctttcaactggagcgcctcgaacagcagatgaactccgcctctggaagtagtagtaatgggtcttcgattaatatgtctggaattgacaatggtgaaggcactcgtctgcgaaatgttcctgttctttttaatgacacagaaactaatctggcaggaatgtacggaaaagttcgcaaagctgctagttcaattgatcagtttagtattcgcctgggaatttttctccgaagataccccatagcgcgagtttttgtaattatatatatggctttgcttcacctctgggtcatgattgttctgttgacttacacaccagaaatgcaccacgaccaaccatatggcaaatgaaccaagcccagttgttgcagtgattggttgtctttttctagacttgggatctgcaagaaggccaattgcctaaaatttctgagaacagtgcacaagattattttatcactacaagcttttaactttttaagttattgtacaagtattctacctaaatcttccaatttcctttaaatggtaagagtttctaaaacagacaataatttaacaagctcagctctgctttatctgagtttagtggtcctaatatatatgtagagaaagatggtggggttgttcacctctgtacagaccatctgtatgttaggtgacattgattatgggttataatcagggaaactaattgtatttagtgacaaaaataaaaagtttttttttataattcagtctgcttttggattttcatatatttaactttgcaaaaagatttactttgtacatgttacaggcttgattggtgtaaatctttttataaatacataaataaaagaaaaatatgcatttttcttttct

SEQ ID NO: 48 - protein, 731 aa, Homo sapiens
MSWFVDLAGKAEDLLNRVDQGAATALSRKDNASNIYSKNTDYTELHQQNTDLIYQTGPKSTYISSAADNIRNQKATILAGTANVKVGSRTPVEASHPVENASVPRPSSHFVRRKKSEPDDELLFDFLNSSQKEPTGRVEIRKEKGKTPVFQSSQTSSVSSVNPSVTTIKTIEENSFGSQTHEAASNSDSSHEGQEESSKENVSSNAACPDHTPTPNDDGKSHELSNLRLENQLLRNEVQSLNQEMASLLQRSKETQEELNKARARVEKWNADHSKSDRMTRGLRAQVDDLTEAVAAKDSQLAVLKVRLQEADQLLSTRTEALEALQSEKSRIMQDQSEGNSLQNQALQTFQERLHEADATLKREQESYKQMQSEFAARLNKVEMERQNLAEAITLAERKYSDEKKRVDELQQQVKLYKLNLESSKQELIDYKQKATRILQSKEKLINSLKEGSGFEGLDSSTASSMELEELRHEKEMQREEIQKLMGQIHQLRSELQDMEAQQVNEAESAREQLQDLHDQIAGQKASKQELETELERLKQEFHYIEEDLYRTKNTLQSRIKDRDEEIQKLRNQLTNKTLSNSSQSELENRLHQLTETLIQKQTMLESLSTEKNSLVFQLERLEQQMNSASGSSSNGSSINMSGIDNGEGTRLRNVPVLFNDTETNLAGMYGKVRKAASSIDQFSIRLGIFLRRYPIARVFVIIYMALLHLWVMIVLLTYTPEMHHDQPYGK

SEQ ID NO: 49 - DNA, 3036 bp, Homo sapiens
atgctcctgggatttcggagaggccgcaggagtcatttcaaacacatcatccatggccttttacctgcagccagcgttgctccgaaggcagctgtgccacgcacacctcctccccgcagccccaacccatctccagagagaccaagatctgctctggcagcagccattctggcgacaacattgactgggcggacggttgctattcctcagcctcgccagaggtcccggtctgagagtgatgtgagcagtgttgaacaggacagcttcatcgagccctatgccaccacctcacagctgaggcctcggccaaattggcagagtgagatgggaagaagatcttctttgccatcctttgaaacactggactatggggacgaagaggacattgaaactcagctgtcatccagcggcaaggaattgggggatgtcagtgcccgggaggacagaggaggccacagtgatgacctgtacgctgtgccacacagaaatcaggtgccattgttacatgaggtgaacagtgaagacgatgaaaatatttctcatcaagatgggtttccaggctcccctcctgcaccacagcggacacaacaaaaagatggtaaacaccctgttctgaatttaaaggatgaaaaacctccattatgtgagaaacctccaccctccccagatataactggtagagcacgtcaaagatatacagaaataaccagagaaaagtttgaggcattaaaagaagaaaatatggacctaaacaatatgaatcaaagccttacccttgaactaaacacaatgaaacaagcaatgaaagaactacagttaaaacttaagggaatggaaaaagagaagagaaagctcaaagaggctgagaaggcgtcgtcacaggaagttgctgcacctgaattactttatctgcgaaaacaagctcaagaactggtggatgaaaatgatggattgaaaatgactgtccatcgtttgaatgtagaactcagtcgatatcagacaaaattcaggcatttgtccaaggaagagagcttaaatattgaaggcctcccatccaagggccctataccaccctggttgttggatataaagtacctgtcaccattgttgctggcttatgaagatatgatgaaagagaaggacgagctcaatgccaccctcaaggaggaaatgagaatgtttaggatgcgagtccaagaagtggtgaaagaaaatgaagaattgcaccaagagttaaataagagtagtgctgttaccagtgaggaatggcgtcagcttcagactcaagcaaaactggttttagaggaaaacaagttgttgctggagcagttggagattcagcaaaggaaagccaaggacagccaccaggagcgcctccaagaagtttctaagctgactaaacaactaatgctcctggaggcaaaaacccacggccaggaaaaggagctggcggagaacagggaacagctggagattttacgtgccaaatgccaagaactcaaaacacactcggatggcaaaatcgcagtggaagttcataaatcaattgtgaatgaattaaaaagccaattacagaaggaagaagagaaagaaagggctgagatggaggagttgatggagaagctgacagtcctgcaagcgcagaagaagagcctgctgttagagaagaacagtttgacagagcaaaacaaagcactggaagccgaacttgaacgagcacagaaaatcaataggaaatctcaaaagaaaattgaggtcctcaaaaagcaggtggaaaaagccatggggaacgaaatgtctgctcatcagtacctggcaaaccttgttggcctggcagaaaatataacccaggaacgtgacagtcttatgtgtttggacttgattagagaccaaggatttcgtggtgatggaggatcaaccacaggtttgtctgctaccccccctgcctcattacctggctcactaactaacgtgaaagccttacagaaatctccaggacctcagcgagaaaggaagtcatcttcatcctcagaagacaggaatcgaatgaaaacacttggtagacgggactcgagtgatgattgggagattcctgatgggcagattacagtgggacaaagaattggatctggatcatttggaacagtctacaagggaaagtggcatggtgatgtggcagtgaaaatgttgaatgtgacagcacctacacctcagcagttacaagccttcaaaaatgaagtaggagtactcaggaaaacacgacatgtgaatatcctactcttcatgggctattccacaaagccacaactggctattgttacccagtggtgtgagggctccagcttgtatcaccatctccatatcattgagaccaaatttgagatgatcaaacttatagatattgcacgacagactgcacagggcatggattacttacacgccaagtcaatcatccacagagacctcaagagtaataatatatttcttcatgaagacctcacagtaaaaataggtgattttggtctagctacagtgaaatctcgatggagtgggtcccatcagtttgaacagttgtctggatccattttgtggatggcaccagaagtcatcagaatgcaagataaaaatccatacagctttcagtcagatgtatatgcatttggaattgttctgtatgaattgatgactggacagttaccttattcaaacatcaacaacagggaccagataatttttatggtgggacgaggatacctgtctccagatctcagtaaggtacggagtaactgtccaaaagccatgaagagattaatggcagagtgcctcaaaaagaaaagagatgagagaccactctttccccaaattctcgcctctattgagctgctggcccgctcattgccaaaaattcaccgcagtgcatcagaaccctccttgaatcgggctggtttccaaacagaggattttagtctatatgcttgtgcttctccaaaaacacccatccaggcagggggatatggtgcgtttcctgtccactga

SEQ ID NO: 50 - protein, 1011 aa, Homo sapiens
MLLGFRRGRRSHFKHIIHGLLPAASVAPKAAVPRTPPPRSPNPSPERPRSALAAAILATTLTGRTVAIPQPRQRSRSESDVSSVEQDSFIEPYATTSQLRPRPNWQSEMGRRSSLPSFETLDYGDEEDIETQLSSSGKELGDVSAREDRGGHSDDLYAVPHRNQVPLLHEVNSEDDENISHQDGFPGSPPAPQRTQQKDGKHPVLNLKDEKPPLCEKPPPSPDITGRARQRYTEITREKFEALKEENMDLNNMNQSLTLELNTMKQAMKELQLKLKGMEKEKRKLKEAEKASSQEVAAPELLYLRKQAQELVDENDGLKMTVHRLNVELSRYQTKFRHLSKEESLNIEGLPSKGPIPPWLLDIKYLSPLLLAYEDMMKEKDELNATLKEEMRMFRMRVQEVVKENEELHQELNKSSAVTSEEWRQLQTQAKLVLEENKLLLEQLEIQQRKAKDSHQERLQEVSKLTKQLMLLEAKTHGQEKELAENREQLEILRAKCQELKTHSDGKIAVEVHKSIVNELKSQLQKEEEKERAEMEELMEKLTVLQAQKKSLLLEKNSLTEQNKALEAELERAQKINRKSQKKIEVLKKQVEKAMGNEMSAHQYLANLVGLAENITQERDSLMCLDLIRDQGFRGDGGSTTGLSATPPASLPGSLTNVKALQKSPGPQRERKSSSSSEDRNRMKTLGRRDSSDDWEIPDGQITVGQRIGSGSFGTVYKGKWHGDVAVKMLNVTAPTPQQLQAFKNEVGVLRKTRHVNILLFMGYSTKPQLAIVTQWCEGSSLYHHLHIIETKFEMIKLIDIARQTAQGMDYLHAKSIIHRDLKSNNIFLHEDLTVKIGDFGLATVKSRWSGSHQFEQLSGSILWMAPEVIRMQDKNPYSFQSDVYAFGIVLYELMTGQLPYSNINNRDQIIFMVGRGYLSPDLSKVRSNCPKAMKRLMAECLKKKRDERPLFPQILASIELLARSLPKIHRSASEPSLNRAGFQTEDFSLYACASPKTPIQAGGYGAFPVH

SEQ ID NO: 51 - DNA, 2609 bp, Homo sapiens
cctgcggcgggctttagggagtggtccctggctgtggatagatctgctgatgagtccaggccccggtccattctcctcgcgctgcaaggatgctcctgggatttcggagaggccgcaggagtcatttcaaacacatcatccatggccttttacctgcagccagcgttgctccgaaggcagctgtgccacgcacacctcctccccgcagccccaacccatctccagagagaccaagatctgctctggcagcagccattctggcgacaacattgactgggcggacggttgctattcctcagcctcgccagaggtcccggtctgagagtgatgtgagcagtgttgaacaggacagcttcatcgagccctatgccaccacctcacagctgaggcctcggccaaattggcagagtgagatgggaagaagatcttctttgccatcctttgaaacactggactatggggacgaagaggacattgaaactcagctgtcatccagcggcaaggaattgggggatgtcagtgcccgggaggacagaggaggccacagtgatgacctgtacgctgtgccacacagaaatcaggtgccattgttacatgaggtgaacagtgaagacgatgaaaatatttctcatcaagatgggtttccaggctcccctcctgcaccacagcggacacaacaaaaagatggtaaacaccctgttctgaatttaaaggatgaaaaacctccattatgtgagaaacctccaccctccccagatataactggtagagcacgtcaaagatatacagaaataaccagagaaaagtttgaggcattaaaagaagaaaatatggacctaaacaatatgaatcaaagccttacccttgaactaaacacaatgaaacaagcaatgaaagaactacagttaaaacttaagggaatggaaaaagagaagagaaagctcaaagaggctgagaaggcgtcgtcacaggaagttgctgcacctgaattactttatctgcgaaaacaagctcaagaactggtggatgaaaatgatggattgaaaatgactgtccatcgtttgaatgtagaactcagtcgatatcagacaaaattcaggcatttgtccaaggaagagagcttaaatattgaaggcctcccatccaagggccctataccaccctggttgttggatataaagtacctgtcaccattgttgctggcttatgaagatatgatgaaagagaaggacgagctcaatgccaccctcaaggaggaaatgagaatgtttaggatgcgagtccaagaagtggtgaaagaaaatgaagaattgcaccaagagttaaataagagtagtgctgttaccagtgaggaatggcgtcagcttcagactcaagcaaaactggttttagaggaaaacaagttgttgctggagcagttggagattcagcaaaggaaagccaaggacagccaccaggagcgcctccaagaagtttctaagctgactaaacaactaatgctcctggaggcaaaaacccacggccaggaaaaggagctggcggagaacagggaacagctggagattttacgtgccaaatgccaagaactcaaaacacactcggatggcaaaatcgcagtggaagttcataaatcaattgtgaatgaattaaaaagccaattacagaaggaagaagagaaagaaagggctgagatggaggagttgatggagaagctgacagtcctgcaagcgcagaagaagagcctgctgttagagaagaacagtttgacagagcaaaacaaagcactggaagccgaacttgaacgagcacagaaaatcaataggaaatctcaaaagaaaattgaggtcctcaaaaagcaggtggaaaaagccatggggaacgaaatgtctgctcatcagtacctggcaaaccttgttggcctggcagaaaatataacccaggaacgtgacagtcttatgtgtttggcaaaatgtttagaaagtgagaaggatggagtgcttaataaagtcataaaaagcaacattcgcctgggaaagttagaggaaaaagtcaagggctacaagaagcaggcagcactgaagctgggggacatcagtcaccgtctgctggagcagcaggaggacttcgccggcaagacagcccagtaccggcaggagatgcggcacctgcaccaggtgctgaaggacaagcaggaggtgctggaccaggcgctgcagcagaacagagaaatggaaggtgaacttgaagttatttgggaatctaccttcagggaaaaccgaagaatccgagaacttctccaggacacactcacgaggacaggcgtgcaggacaaccccagagctctggttgcccccagcctcaatggcgtctctcaggcagacctgctggacggctgcgatgtctgctcctatgacctgaagtctcatgcccccacctgctagaatctgcgggagcccgtggtgtagcctcctctggcctgaaaggtctgcctcacacaggccttccctgcagggcagcccatggtggcagccggaggtgcgtaagcccactgaacgctgcagggcagggaagaaataaatggtctcatagtttaatccattgataaaaaa

SEQ ID NO: 52 - protein, 783 aa, Homo sapiens
MLLGFRRGRRSHFKHIIHGLLPAASVAPKAAVPRTPPPRSPNPSPERPRSALAAAILATTLTGRTVAIPQPRQRSRSESDVSSVEQDSFIEPYATTSQLRPRPNWQSEMGRRSSLPSFETLDYGDEEDIETQLSSSGKELGDVSAREDRGGHSDDLYAVPHRNQVPLLHEVNSEDDENISHQDGFPGSPPAPQRTQQKDGKHPVLNLKDEKPPLCEKPPPSPDITGRARQRYTEITREKFEALKEENMDLNNMNQSLTLELNTMKQAMKELQLKLKGMEKEKRKLKEAEKASSQEVAAPELLYLRKQAQELVDENDGLKMTVHRLNVELSRYQTKFRHLSKEESLNIEGLPSKGPIPPWLLDIKYLSPLLLAYEDMMKEKDELNATLKEEMRMFRMRVQEVVKENEELHQELNKSSAVTSEEWRQLQTQAKLVLEENKLLLEQLEIQQRKAKDSHQERLQEVSKLTKQLMLLEAKTHGQEKELAENREQLEILRAKCQELKTHSDGKIAVEVHKSIVNELKSQLQKEEEKERAEMEELMEKLTVLQAQKKSLLLEKNSLTEQNKALEAELERAQKINRKSQKKIEVLKKQVEKAMGNEMSAHQYLANLVGLAENITQERDSLMCLAKCLESEKDGVLNKVIKSNIRLGKLEEKVKGYKKQAALKLGDISHRLLEQQEDFAGKTAQYRQEMRHLHQVLKDKQEVLDQALQQNREMEGELEVIWESTFRENRRIRELLQDTLTRTGVQDNPRALVAPSLNGVSQADLLDGCDVCSYDLKSHAPTC

SEQ ID NO: 53 - DNA, 2997 bp, Homo sapiens
atggcggacctggccgagtgcaacatcaaagtgatgtgtcgcttcagacctctcaacgagtctgaagtgaaccgcggcgacaagtacatcgccaagtttcagggagaagacacggtcgtgatcgcgtccaagccttatgcatttgatcgggtgttccagtcaagcacatctcaagagcaagtgtataatgactgtgcaaagaagattgttaaagatgtacttgaaggatataatggaacaatatttgcatatggacaaacatcctctgggaagacacacacaatggagggtaaacttcatgatccagaaggcatgggaattattccaagaatagtgcaagatatttttaattatatttactccatggatgaaaatttggaatttcatattaaggtttcatattttgaaatatatttggataagataagggacctgttagatgtttcaaagaccaacctttcagttcatgaagacaaaaaccgagttccctatgtaaaggggtgcacagagcgttttgtatgtagtccagatgaagttatggataccatagatgaaggaaaatccaacagacatgtagcagttacaaatatgaatgaacatagctctaggagtcacagtatatttcttattaatgtcaaacaagagaacacacaaacggaacaaaagctgagtggaaaactttatctggttgatttagctggtagtgaaaaggttagtaaaactggagctgaaggtgctgtgctggatgaagctaaaaacatcaacaagtcactttctgctcttggaaatgttatttctgctttggctgagggtagtacatatgttccatatcgagatagtaaaatgacaagaatccttcaagattcattaggtggcaactgtagaaccactattgtaatttgctgctctccatcatcatacaatgagtctgaaacaaaatctacactcttatttggccaaagggccaaaacaattaagaacacagtttgtgtcaatgtggagttaactgcagaacagtggaaaaagaagtatgaaaaagaaaaagaaaaaaataagatcctgcggaacactattcagtggcttgaaaatgagctcaacagatggcgtaatggggagacggtgcctattgatgaacagtttgacaaagagaaagccaacttggaagctttcacagtggataaagatattactcttaccaatgataaaccagcaaccgcaattggagttataggaaattttactgatgctgaaagaagaaagtgtgaagaagaaattgctaaattatacaaacagcttgatgacaaggatgaagaaattaaccagcaaagtcaactggtagagaaactgaagacgcaaatgttggatcaggaggagcttttggcatctaccagaagggatcaagacaatatgcaagctgagctgaatcgccttcaagcagaaaatgatgcctctaaagaagaagtgaaagaagttttacaggccctagaagaacttgctgtcaattatgatcagaagtctcaggaagttgaagacaaaactaaggaatatgaattgcttagtgatgaattgaatcagaaatcggcaactttagcgagtatagatgctgagcttcagaaacttaaggaaatgaccaaccaccagaaaaaacgagcagctgagatgatggcatctttactaaaagaccttgcagaaataggaattgctgtgggaaataatgatgtaaagcagcctgagggaactggcatgatagatgaagagttcactgttgcaagactctacattagcaaaatgaagtcagaagtaaaaaccatggtgaaacgttgcaagcagttagaaagcacacaaactgagagcaacaaaaaaatggaagaaaatgaaaaggagttagcagcatgtcagcttcgtatctctcaagaggatccaaagtgggaattccctcggaagaacttggttcttggaaaaactctaggagaaggcgaatttggaaaagtggtcaaggcaacggccttccatctgaaaggcagagcagggtacaccacggtggccgtgaagatgctgaaagagaacgcctccccgagtgagcttcgagacctgctgtcagagttcaacgtcctgaagcaggtcaaccacccacatgtcatcaaattgtatggggcctgcagccaggatggcccgctcctcctcatcgtggagtacgccaaatacggctccctgcggggcttcctccgcgagagccgcaaagtggggcctggctacctgggcagtggaggcagccgcaactccagctccctggaccacccggatgagcgggccctcaccatgggcgacctcatctcatttgcctggcagatctcacaggggatgcagtatctggccgagatgaagctcgttcatcgggacttggcagccagaaacatcctggtagctgaggggcggaagatgaagatttcggatttcggcttgtcccgagatgtttatgaagaggattcctacgtgaagaggagccagggtcggattccagttaaatggatggcaattgaatccctttttgatcatatctacaccacgcaaagtgatgtatggtcttttggtgtcctgctgtgggagatcgtgaccctagggggaaacccctatcctgggattcctcctgagcggctcttcaaccttctgaagaccggccaccggatggagaggccagacaactgcagcgaggagatgtaccgcctgatgctgcaatgctggaagcaggagccggacaaaaggccggtgtttgcggacatcagcaaagacctggagaagatgatggttaagaggagagactacttggaccttgcggcgtccactccatctgactccctgatttatgacgacggcctctcagaggaggagacaccgctggtggactgtaataatgcccccctccctcgagccctcccttccacatggattgaaaacaaactctatggtagaatttcccatgcatttactagattctag

SEQ ID NO: 54 - protein, 998 aa, Homo sapiens
MADLAECNIKVMCRFRPLNESEVNRGDKYIAKFQGEDTVVIASKPYAFDRVFQSSTSQEQVYNDCAKKIVKDVLEGYNGTIFAYGQTSSGKTHTMEGKLHDPEGMGIIPRIVQDIFNYIYSMDENLEFHIKVSYFEIYLDKIRDLLDVSKTNLSVHEDKNRVPYVKGCTERFVCSPDEVMDTIDEGKSNRHVAVTNMNEHSSRSHSIFLINVKQENTQTEQKLSGKLYLVDLAGSEKVSKTGAEGAVLDEAKNINKSLSALGNVISALAEGSTYVPYRDSKMTRILQDSLGGNCRTTIVICCSPSSYNESETKSTLLFGQRAKTIKNTVCVNVELTAEQWKKKYEKEKEKNKILRNTIQWLENELNRWRNGETVPIDEQFDKEKANLEAFTVDKDITLTNDKPATAIGVIGNFTDAERRKCEEEIAKLYKQLDDKDEEINQQSQLVEKLKTQMLDQEELLASTRRDQDNMQAELNRLQAENDASKEEVKEVLQALEELAVNYDQKSQEVEDKTKEYELLSDELNQKSATLASIDAELQKLKEMTNHQKKRAAEMMASLLKDLAEIGIAVGNNDVKQPEGTGMIDEEFTVARLYISKMKSEVKTMVKRCKQLESTQTESNKKMEENEKELAACQLRISQEDPKWEFPRKNLVLGKTLGEGEFGKVVKATAFHLKGRAGYTTVAVKMLKENASPSELRDLLSEFNVLKQVNHPHVIKLYGACSQDGPLLLIVEYAKYGSLRGFLRESRKVGPGYLGSGGSRNSSSLDHPDERALTMGDLISFAWQISQGMQYLAEMKLVHRDLAARNILVAEGRKMKISDFGLSRDVYEEDSYVKRSQGRIPVKWMAIESLFDHIYTTQSDVWSFGVLLWEIVTLGGNPYPGIPPERLFNLLKTGHRMERPDNCSEEMYRLMLQCWKQEPDKRPVFADISKDLEKMMVKRRDYLDLAASTPSDSLIYDDGLSEEETPLVDCNNAPLPRALPSTWIENKLYGRISHAFTRF

SEQ ID NO: 55 - DNA, 5905 bp, Homo sapiens
ctcctcccgcaccgccctgtcgcccaacggcggcctcaggagtgatcgggcagcagtcggccggccagcggacggcagagcgggcggacgggtaggcccggcctgctcttcgcgaggaggaagaaggtggccactctcccggtccccagaacctccccagcccccgcagtccgcccagaccgtaaagggggacgctgaggagccgcggacgctctccccggtgccgccgccgctgccgccgccatggctgccatgatggatcggaagtgagcattagggttaacggctgccggcgccggctcttcaagtcccggctccccggccgcctccacccggggaagcgcagcgcggcgcagctgactgctgcctctcacggccctcgcgaccacaagccctcaggtccggcgcgttccctgcaagactgagcggcggggagtggctcccggccgccggccccggctgcgagaaagatggcggacctggccgagtgcaacatcaaagtgatgtgtcgcttcagacctctcaacgagtctgaagtgaaccgcggcgacaagtacatcgccaagtttcagggagaagacacggtcgtgatcgcgtccaagccttatgcatttgatcgggtgttccagtcaagcacatctcaagagcaagtgtataatgactgtgcaaagaagattgttaaagatgtacttgaaggatataatggaacaatatttgcatatggacaaacatcctctgggaagacacacacaatggagggtaaacttcatgatccagaaggcatgggaattattccaagaatagtgcaagatatttttaattatatttactccatggatgaaaatttggaatttcatattaaggtttcatattttgaaatatatttggataagataagggacctgttagatgtttcaaagaccaacctttcagttcatgaagacaaaaaccgagttccctatgtaaaggggtgcacagagcgttttgtatgtagtccagatgaagttatggataccatagatgaaggaaaatccaacagacatgtagcagttacaaatatgaatgaacatagctctaggagtcacagtatatttcttattaatgtcaaacaagagaacacacaaacggaacaaaagctgagtggaaaactttatctggttgatttagctggtagtgaaaaggttagtaaaactggagctgaaggtgctgtgctggatgaagctaaaaacatcaacaagtcactttctgctcttggaaatgttatttctgctttggctgagggtagtacatatgttccatatcgagatagtaaaatgacaagaatccttcaagattcattaggtggcaactgtagaaccactattgtaatttgctgctctccatcatcatacaatgagtctgaaacaaaatctacactcttatttggccaaagggccaaaacaattaagaacacagtttgtgtcaatgtggagttaactgcagaacagtggaaaaagaagtatgaaaaagaaaaagaaaaaaataagatcctgcggaacactattcagtggcttgaaaatgagctcaacagatggcgtaatggggagacggtgcctattgatgaacagtttgacaaagagaaagccaacttggaagctttcacagtggataaagatattactcttaccaatgataaaccagcaaccgcaattggagttataggaaattttactgatgctgaaagaagaaagtgtgaagaagaaattgctaaattatacaaacagcttgatgacaaggatgaagaaattaaccagcaaagtcaactggtagagaaactgaagacgcaaatgttggatcaggaggagcttttggcatctaccagaagggatcaagacaatatgcaagctgagctgaatcgccttcaagcagaaaatgatgcctctaaagaagaagtgaaagaagttttacaggccctagaagaacttgctgtcaattatgatcagaagtctcaggaagttgaagacaaaactaaggaatatgaattgcttagtgatgaattgaatcagaaatcggcaactttagcgagtatagatgctgagcttcagaaacttaaggaaatgaccaaccaccagaaaaaacgagcagctgagatgatggcatctttactaaaagaccttgcagaaataggaattgctgtgggaaataatgatgtaaagcagcctgagggaactggcatgatagatgaagagttcactgttgcaagactctacattagcaaaatgaagtcagaagtaaaaaccatggtgaaacgttgcaagcagttagaaagcacacaaactgagagcaacaaaaaaatggaagaaaatgaaaaggagttagcagcatgtcagcttcgtatctctcaacatgaagccaaaatcaagtcattgactgaataccttcaaaatgtggaacaaaagaaaagacagttggaggaatctgtcgatgccctcagtgaagaactagtccagcttcgagcacaagagaaagtccatgaaatggaaaaggagcacttaaataaggttcagactgcaaatgaagttaagcaagctgttgaacagcagatccagagccatagagaaactcatcaaaaacagatcagtagtttgagagatgaagtagaagcaaaagcaaaacttattactgatcttcaagaccaaaaccagaaaatgatgttagagcaggaacgtctaagagtagaacatgagaagttgaaagccacagatcaggaaaagagcagaaaactacatgaacttacggttatgcaagatagacgagaacaagcaagacaagacttgaagggtttggaagagacagtggcaaaagaacttcagactttacacaacctgcgcaaactctttgttcaggacctggctacaagagttaaaaagagtgctgagattgattctgatgacaccggaggcagcgctgctcagaagcaaaaaatctcctttcttgaaaataatcttgaacagctcactaaagtgcacaaacagttggtacgtgataatgcagatctccgctgtgaacttcctaagttggaaaagcgacttcgagctacagctgagagagtgaaagctttggaatcagcactgaaagaagctaaagaaaatgcatctcgtgatcgcaaacgctatcagcaagaagtagatcgcataaaggaagcagtcaggtcaaagaatatggccagaagagggcattctgcacagattgctaaacctattcgtcccgggcaacatccagcagcttctccaactcacccaagtgcaattcgtggaggaggtgcatttgttcagaacagccagccagtggcagtgcgaggtggaggaggcaaacaagtgtaatcgtttatacatacccacaggtgttaaaaagtaatcgaagtacgaagaggacatggtatcaagcagtcattcaatgactataacctctactcccttgggattgtagaattataacttttaaaaaaaatgtataaattatacctggcctgtacagctgtttcctacctactcttcttgtaaactctgctgcttcccaacacaactagagtgcaattttggcatcttaggagggaaaaaggacagtttacaactgtggccctatttattacacagtttgtctatcgtgtcttaaatttagtctttactgtgccaagctaactgtaccttataggactgtactttttgtattttttgtgtatgtttattttttaatctcagtttaaattacctagctgctactgcttcttgtttttcttttcctattaaaacgtcttcctttttttttcttaagagaaaatggaacatttaggttaaatgtctttaaattttaccacttaacaacactacatgcccataaaatatatccagtcagtactgtattttaaaatcccttgaaatgatgatatcagggttaaaattacttgtattgtttctgaagtttgctcctgaaaactactgtttgagcactgaaacgttacaaatgcctaataggcatttgagactgagcaaggctacttgttatctcatgaaatgcctgttgccgagttattttgaatagaaatattttaaagtatcaaaagcagatcttagtttaagggagtttggaaaaggaattatatttctctttttcctgattctgtactcaacaagtcttgatggaattaaaatactctgctttattctggtgagcctgctagctaatataagtattggacaggtaataatttgtcatctttaatattagtaaaatgaattaagatattataggattaaacataattttatacggttagtactttattggccgacctaaatttatagcgtgtggaaattgagaaaaatgaagaaacaggacagatatatgatgaattaaaaatatatataggtcaattttggtctgaaatccctgaggtgtttttaacctgctacactaatttgtacactaatttatttctttagtctagaaatagtaaattgtttgcaagtcactaataatcattagataaattattttcttggccatagccgataattttgtaatcagtactaagtgtatacgtatttttgccactttttcctcagatgattaaagtaagtcaacagcttattttaggaaactgtaaaagtaatagggaaagagatttcactatttgcttcatcagtggtaggggggcggtgactgcaactgtgttagcagaaattcacagagaatggggatttaaggttagcagagaaacttggaaagttctgtgttaggatcttgctggcagaattaactttttgcaaaagttttatacacagatatttgtattaaatttggagccatagtcagaagactcagatcataattggcttatttttctatttccgtaactattgtaatttccacttttgtaataattttgatttaaaatataaatttatttatttatttttttaatagtcaaaaatctttgctgttgtagtctgcaacctctaaaatgattgtgttgcttttaggattgatcagaagaaacactccaaaaattgagatgaaatgttggtgcagccagttataagtaatatagttaacaagcaaaaaaagtgctgccaccttttatgatgattttctaaatggagaaacatttggctgcatccacatagacctttatgttttgttttcagttgaaaacttgcctcctttggcaacattcgtaaatgaagcagaatttttttttctcttttttccaaatatgttagttttgttcttgtaagatgtatcatgggtattggtgctgtgtaatgaacaacgaattttaattagcatgtggttcagaatatacaatgttaggtttttaaaaagtatcttgatggttcttttctatttataatttcagactttcataaagtgtaccaagaatttcataaatttgttttcagtgaactgctttttgctatggtaggtcattaaacacagcacttactcttaaaaatgaaaatttctgatcatctaggatattgacacatttcaatttgcagtgtctttttgactggatatattaacgttcctctgaatggcattgatagatggttcagaagagaaactcaatgaaataaagagaatatttattcatggcgattaattaaattatttgcctaacttaagaaaactactgtgcgtaactctcagtttgtgcttaactccatttgacatgaggtgacagaagagagtctgagtctacctgtggaatatgttggtttattttcagtgcttgaagatacattcacaaatacttggtttgggaagacaccgtttaattttaagttaacttgcatgttgtaaatgcgttttatgtttaaataaagaggaaaattttttgaaatgtaaaaaaaaaaaaaaaaaa

SEQ ID NO: 56 - protein, 963 aa, Homo sapiens
MADLAECNIKVMCRFRPLNESEVNRGDKYIAKFQGEDTVVIASKPYAFDRVFQSSTSQEQVYNDCAKKIVKDVLEGYNGTIFAYGQTSSGKTHTMEGKLHDPEGMGIIPRIVQDIFNYIYSMDENLEFHIKVSYFEIYLDKIRDLLDVSKTNLSVHEDKNRVPYVKGCTERFVCSPDEVMDTIDEGKSNRHVAVTNMNEHSSRSHSIFLINVKQENTQTEQKLSGKLYLVDLAGSEKVSKTGAEGAVLDEAKNINKSLSALGNVISALAEGSTYVPYRDSKMTRILQDSLGGNCRTTIVICCSPSSYNESETKSTLLFGQRAKTIKNTVCVNVELTAEQWKKKYEKEKEKNKILRNTIQWLENELNRWRNGETVPIDEQFDKEKANLEAFTVDKDITLTNDKPATAIGVIGNFTDAERRKCEEEIAKLYKQLDDKDEEINQQSQLVEKLKTQMLDQEELLASTRRDQDNMQAELNRLQAENDASKEEVKEVLQALEELAVNYDQKSQEVEDKTKEYELLSDELNQKSATLASIDAELQKLKEMTNHQKKRAAEMMASLLKDLAEIGIAVGNNDVKQPEGTGMIDEEFTVARLYISKMKSEVKTMVKRCKQLESTQTESNKKMEENEKELAACQLRISQHEAKIKSLTEYLQNVEQKKRQLEESVDALSEELVQLRAQEKVHEMEKEHLNKVQTANEVKQAVEQQIQSHRETHQKQISSLRDEVEAKAKLITDLQDQNQKMMLEQERLRVEHEKLKATDQEKSRKLHELTVMQDRREQARQDLKGLEETVAKELQTLHNLRKLFVQDLATRVKKSAEIDSDDTGGSAAQKQKISFLENNLEQLTKVHKQLVRDNADLRCELPKLEKRLRATAERVKALESALKEAKENASRDRKRYQQEVDRIKEAVRSKNMARRGHSAQIAKPIRPGQHPAASPTHPSAIRGGGAFVQNSQPVAVRGGGGKQV

SEQ ID NO: 57 - DNA, 2133 bp, Homo sapiens
atggaggagccgcagtcagatcctagcgtcgagccccctctgagtcaggaaacattttcagacctatggaaactacttcctgaaaacaacgttctgtcccccttgccgtcccaagcaatggatgatttgatgctgtccccggacgatattgaacaatggttcactgaagacccaggtccagatgaagctcccagaatgccagaggctgctccccccgtggcccctgcaccagcagctcctacaccggcggcccctgcaccagccccctcctggcccctgtcatcttctgtcccttcccagaaaacctaccagggcagctacggtttccgtctgggcttcttgcattctgggacagccaagtctgtgacttgcacgtactcccctgccctcaacaagatgttttgccaactggccaagacctgccctgtgcagctgtgggttgattccacacccccgcccggcacccgcgtccgcgccatggccatctacaagcagtcacagcacatgacggaggttgtgaggcgctgcccccaccatgagcgctgctcagatagcgatggtctggcccctcctcagcatcttatccgagtggaaggaaatttgcgtgtggagtatttggatgacagaaacacttttcgacatagtgtggtggtgccctatgagccgcctgaggttggctctgactgtaccaccatccactacaactacatgtgtaacagttcctgcatgggcggcatgaaccggaggcccatcctcaccatcatcacactggaagactccagtggtaatctactgggacggaacagctttgaggtgcgtgtttgtgcctgtcctgggagagaccggcgcacagaggaagagaatctccgcaagaaaggggagcctcaccacgagctgcccccagggagcactaagcgagtctccttctcgccggtggacactaacagcacatctggagacccggtggagaagaaggacgaaacaccttttggggtctcggtggctgtgggcctggccgtctttgcctgcctcttcctttctacgctgctccttgtgctcaacaaatgtggacggagaaacaagtttgggatcaaccgcccggctgtgctggctccagaggatgggctggccatgtccctgcatttcatgacattgggtggcagctccctgtcccccaccgagggcaaaggctctgggctccaaggccacatcatcgagaacccacaatacttcagtgatgcctgtgttcaccacatcaagcgccgggacatcgtgctcaagtgggagctgggggagggcgcctttgggaaggtcttccttgctgagtgccacaacctcctgcctgagcaggacaagatgctggtggctgtcaaggcactgaaggaggcgtccgagagtgctcggcaggacttccagcgtgaggctgagctgctcaccatgctgcagcaccagcacatcgtgcgcttcttcggcgtctgcaccgagggccgccccctgctcatggtctttgagtatatgcggcacggggacctcaaccgcttcctccgatcccatggacctgatgccaagctgctggctggtggggaggatgtggctccaggccccctgggtctggggcagctgctggccgtggctagccaggtcgctgcggggatggtgtacctggcgggtctgcattttgtgcaccgggacctggccacacgcaactgtctagtgggccagggactggtggtcaagattggtgattttggcatgagcagggatatctacagcaccgactattaccgtgtgggaggccgcaccatgctgcccattcgctggatgccgcccgagagcatcctgtaccgtaagttcaccaccgagagcgacgtgtggagcttcggcgtggtgctctgggagatcttcacctacggcaagcagccctggtaccagctctccaacacggaggcaatcgactgcatcacgcagggacgtgagttggagcggccacgtgcctgcccaccagaggtctacgccatcatgcggggctgctggcagcgggagccccagcaacgccacagcatcaaggatgtgcacgcccggctgcaagccctggcccaggcacctcctgtctacctggatgtcctgggctag

SEQ ID NO: 58 - protein, 710 aa, Homo sapiens
MEEPQSDPSVEPPLSQETFSDLWKLLPENNVLSPLPSQAMDDLMLSPDDIEQWFTEDPGPDEAPRMPEAAPPVAPAPAAPTPAAPAPAPSWPLSSSVPSQKTYQGSYGFRLGFLHSGTAKSVTCTYSPALNKMFCQLAKTCPVQLWVDSTPPPGTRVRAMAIYKQSQHMTEVVRRCPHHERCSDSDGLAPPQHLIRVEGNLRVEYLDDRNTFRHSVVVPYEPPEVGSDCTTIHYNYMCNSSCMGGMNRRPILTIITLEDSSGNLLGRNSFEVRVCACPGRDRRTEEENLRKKGEPHHELPPGSTKRVSFSPVDTNSTSGDPVEKKDETPFGVSVAVGLAVFACLFLSTLLLVLNKCGRRNKFGINRPAVLAPEDGLAMSLHFMTLGGSSLSPTEGKGSGLQGHIIENPQYFSDACVHHIKRRDIVLKWELGEGAFGKVFLAECHNLLPEQDKMLVAVKALKEASESARQDFQREAELLTMLQHQHIVRFFGVCTEGRPLLMVFEYMRHGDLNRFLRSHGPDAKLLAGGEDVAPGPLGLGQLLAVASQVAAGMVYLAGLHFVHRDLATRNCLVGQGLVVKIGDFGMSRDIYSTDYYRVGGRTMLPIRWMPPESILYRKFTTESDVWSFGVVLWEIFTYGKQPWYQLSNTEAIDCITQGRELERPRACPPEVYAIMRGCWQREPQQRHSIKDVHARLQALAQAPPVYLDVLG

SEQ ID NO: 59 - DNA, 2958 bp, Homo sapiens
gatgggattggggttttcccctcccatgtgctcaagactggcgctaaaagttttgagcttctcaaaagtctagagccaccgtccagggagcaggtagctgctgggctccggggacactttgcgttcgggctgggagcgtgctttccacgacggtgacacgcttccctggattggcagccagactgccttccgggtcactgccatggaggagccgcagtcagatcctagcgtcgagccccctctgagtcaggaaacattttcagacctatggaaactacttcctgaaaacaacgttctgtcccccttgccgtcccaagcaatggatgatttgatgctgtccccggacgatattgaacaatggttcactgaagacccaggtccagatgaagctcccagaatgccagaggctgctccccccgtggcccctgcaccagcagctcctacaccggcggcccctgcaccagccccctcctggcccctgtcatcttctgtcccttcccagaaaacctaccagggcagctacggtttccgtctgggcttcttgcattctgggacagccaagtctgtgacttgcacgtactcccctgccctcaacaagatgttttgccaactggccaagacctgccctgtgcagctgtgggttgattccacacccccgcccggcacccgcgtccgcgccatggccatctacaagcagtcacagcacatgacggaggttgtgaggcgctgcccccaccatgagcgctgctcagatagcgatggtctggcccctcctcagcatcttatccgagtggaaggaaatttgcgtgtggagtatttggatgacagaaacacttttcgacatagtgtggtggtgccctatgagccgcctgaggttggctctgactgtaccaccatccactacaactacatgtgtaacagttcctgcatgggcggcatgaaccggaggcccatcctcaccatcatcacactggaagactccagtggtaatctactgggacggaacagctttgaggtgcgtgtttgtgcctgtcctgggagagaccggcgcacagaggaagagaatctccgcaagaaaggggagcctcaccacgagctgcccccagggagcactaagcgagcactgcccaacaacaccagctcctctccccagccaaagaagaaaccactggatggagaatatttcacccttcagtctccttcccggccagtgtgcagctgcacacggcggtggagatgcaccactggtgcatccccttctctgtggatgggcagccggcaccgtctctgcgctggctcttcaatggctccgtgctcaatgagaccagcttcatcttcactgagttcctggagccggcagccaatgagaccgtgcggcacgggtgtctgcgcctcaaccagcccacccacgtcaacaacggcaactacacgctgctggctgccaaccccttcggccaggcctccgcctccatcatggctgccttcatggacaaccctttcgagttcaaccccgaggaccccatccctgtctccttctcgccggtggacactaacagcacatctggagacccggtggagaagaaggacgaaacaccttttggggtctcggtggctgtgggcctggccgtctttgcctgcctcttcctttctacgctgctccttgtgctcaacaaatgtggacggagaaacaagtttgggatcaaccgcccggctgtgctggctccagaggatgggctggccatgtccctgcatttcatgacattgggtggcagctccctgtcccccaccgagggcaaaggctctgggctccaaggccacatcatcgagaacccacaatacttcagtgatgcctgtgttcaccacatcaagcgccgggacatcgtgctcaagtgggagctgggggagggcgcctttgggaaggtcttccttgctgagtgccacaacctcctgcctgagcaggacaagatgctggtggctgtcaaggcactgaaggaggcgtccgagagtgctcggcaggacttccagcgtgaggctgagctgctcaccatgctgcagcaccagcacatcgtgcgcttcttcggcgtctgcaccgagggccgccccctgctcatggtctttgagtatatgcggcacggggacctcaaccgcttcctccgatcccatggacctgatgccaagctgctggctggtggggaggatgtggctccaggccccctgggtctggggcagctgctggccgtggctagccaggtcgctgcggggatggtgtacctggcgggtctgcattttgtgcaccgggacctggccacacgcaactgtctagtgggccagggactggtggtcaagattggtgattttggcatgagcagggatatctacagcaccgactattaccgtgtgggaggccgcaccatgctgcccattcgctggatgccgcccgagagcatcctgtaccgtaagttcaccaccgagagcgacgtgtggagcttcggcgtggtgctctgggagatcttcacctacggcaagcagccctggtaccagctctccaacacggaggcaatcgactgcatcacgcagggacgtgagttggagcggccacgtgcctgcccaccagaggtctacgccatcatgcggggctgctggcagcgggagccccagcaacgccacagcatcaaggatgtgcacgcccggctgcaagccctggcccaggcacctcctgtctacctggatgtcctgggctagggggccggcccaggggctgggagtggttagccggaatactggggcctgccctcagcatcccccatagctcccagcagccccagggtgatctcaaagtatctaattcaccctcagcatgtgggaagggacaggtgggggctgggagtagaggatgttcctgcttctctaggcaaggtcccgtcatagcaattatatttattatcccttgaaaaaaaa

SEQ ID NO: 60 - DNA, 3125 bp, Homo sapiens
gatgggattggggttttcccctcccatgtgctcaagactggcgctaaaagttttgagcttctcaaaagtctagagccaccgtccagggagcaggtagctgctgggctccggggacactttgcgttcgggctgggagcgtgctttccacgacggtgacacgcttccctggattggcagccagactgccttccgggtcactgccatggaggagccgcagtcagatcctagcgtcgagccccctctgagtcaggaaacattttcagacctatggaaactacttcctgaaaacaacgttctgtcccccttgccgtcccaagcaatggatgatttgatgctgtccccggacgatattgaacaatggttcactgaagacccaggtccagatgaagctcccagaatgccagaggctgctccccccgtggcccctgcaccagcagctcctacaccggcggcccctgcaccagccccctcctggcccctgtcatcttctgtcccttcccagaaaacctaccagggcagctacggtttccgtctgggcttcttgcattctgggacagccaagtctgtgacttgcacgtactcccctgccctcaacaagatgttttgccaactggccaagacctgccctgtgcagctgtgggttgattccacacccccgcccggcacccgcgtccgcgccatggccatctacaagcagtcacagcacatgacggaggttgtgaggcgctgcccccaccatgagcgctgctcagatagcgatggtctggcccctcctcagcatcttatccgagtggaaggaaatttgcgtgtggagtatttggatgacagaaacacttttcgacatagtgtggtggtgccctatgagccgcctgaggttggctctgactgtaccaccatccactacaactacatgtgtaacagttcctgcatgggcggcatgaaccggaggcccatcctcaccatcatcacactggaagactccagtggtaatctactgggacggaacagctttgaggtgcgtgtttgtgcctgtcctgggagagaccggcgcacagaggaagagaatctccgcaagaaaggggagcctcaccacgagctgcccccagggagcactaagcgagcactgcccaacaacaccagctcctctccccagccaaagaagaaaccactggatggagaatatttcacccttcagatgctacttgacttacgatggtgttacttcctgataaactcgtcgtaagttgaaaatattatccgtgggcgtgagcgcttcgagatgttccgagagctgaatgaggccttggaactcaaggatgcccaggctgggaaggagccaggggggagcagggctcactccagtctccttcccggccagtgtgcagctgcacacggcggtggagatgcaccactggtgcatccccttctctgtggatgggcagccggcaccgtctctgcgctggctcttcaatggctccgtgctcaatgagaccagcttcatcttcactgagttcctggagccggcagccaatgagaccgtgcggcacgggtgtctgcgcctcaaccagcccacccacgtcaacaacggcaactacacgctgctggctgccaaccccttcggccaggcctccgcctccatcatggctgccttcatggacaaccctttcgagttcaaccccgaggaccccatccctgtctccttctcgccggtggacactaacagcacatctggagacccggtggagaagaaggacgaaacaccttttggggtctcggtggctgtgggcctggccgtctttgcctgcctcttcctttctacgctgctccttgtgctcaacaaatgtggacggagaaacaagtttgggatcaaccgcccggctgtgctggctccagaggatgggctggccatgtccctgcatttcatgacattgggtggcagctccctgtcccccaccgagggcaaaggctctgggctccaaggccacatcatcgagaacccacaatacttcagtgatgcctgtgttcaccacatcaagcgccgggacatcgtgctcaagtgggagctgggggagggcgcctttgggaaggtcttccttgctgagtgccacaacctcctgcctgagcaggacaagatgctggtggctgtcaaggcactgaaggaggcgtccgagagtgctcggcaggacttccagcgtgaggctgagctgctcaccatgctgcagcaccagcacatcgtgcgcttcttcggcgtctgcaccgagggccgccccctgctcatggtctttgagtatatgcggcacggggacctcaaccgcttcctccgatcccatggacctgatgccaagctgctggctggtggggaggatgtggctccaggccccctgggtctggggcagctgctggccgtggctagccaggtcgctgcggggatggtgtacctggcgggtctgcattttgtgcaccgggacctggccacacgcaactgtctagtgggccagggactggtggtcaagattggtgattttggcatgagcagggatatctacagcaccgactattaccgtgtgggaggccgcaccatgctgcccattcgctggatgccgcccgagagcatcctgtaccgtaagttcaccaccgagagcgacgtgtggagcttcggcgtggtgctctgggagatcttcacctacggcaagcagccctggtaccagctctccaacacggaggcaatcgactgcatcacgcagggacgtgagttggagcggccacgtgcctgcccaccagaggtctacgccatcatgcggggctgctggcagcgggagccccagcaacgccacagcatcaaggatgtgcacgcccggctgcaagccctggcccaggcacctcctgtctacctggatgtcctgggctagggggccggcccaggggctgggagtggttagccggaatactggggcctgccctcagcatcccccatagctcccagcagccccagggtgatctcaaagtatctaattcaccctcagcatgtgggaagggacaggtgggggctgggagtagaggatgttcctgcttctctaggcaaggtcccgtcatagcaattatatttattatcccttgaaaaaaaa

SEQ ID NO: 61 - DNA, 4360 bp, Homo sapiens
gatgggattggggttttcccctcccatgtgctcaagactggcgctaaaagttttgagcttctcaaaagtctagagccaccgtccagggagcaggtagctgctgggctccggggacactttgcgttcgggctgggagcgtgctttccacgacggtgacacgcttccctggattggcagccagactgccttccgggtcactgccatggaggagccgcagtcagatcctagcgtcgagccccctctgagtcaggaaacattttcagacctatggaaactacttcctgaaaacaacgttctgtcccccttgccgtcccaagcaatggatgatttgatgctgtccccggacgatattgaacaatggttcactgaagacccaggtccagatgaagctcccagaatgccagaggctgctccccccgtggcccctgcaccagcagctcctacaccggcggcccctgcaccagccccctcctggcccctgtcatcttctgtcccttcccagaaaacctaccagggcagctacggtttccgtctgggcttcttgcattctgggacagccaagtctgtgacttgcacgtactcccctgccctcaacaagatgttttgccaactggccaagacctgccctgtgcagctgtgggttgattccacacccccgcccggcacccgcgtccgcgccatggccatctacaagcagtcacagcacatgacggaggttgtgaggcgctgcccccaccatgagcgctgctcagatagcgatggtctggcccctcctcagcatcttatccgagtggaaggaaatttgcgtgtggagtatttggatgacagaaacacttttcgacatagtgtggtggtgccctatgagccgcctgaggttggctctgactgtaccaccatccactacaactacatgtgtaacagttcctgcatgggcggcatgaaccggaggcccatcctcaccatcatcacactggaagactccagtggtaatctactgggacggaacagctttgaggtgcgtgtttgtgcctgtcctgggagagaccggcgcacagaggaagagaatctccgcaagaaaggggagcctcaccacgagctgcccccagggagcactaagcgagcactgcccaacaacaccagctcctctccccagccaaagaagaaaccactggatggagaatatttcacccttcagatgctacttgacttacgatggtgttacttcctgataaactcgtcgtaagttgaaaatattatccgtgggcgtgagcgcttcgagatgttccgagagctgaatgaggccttggaactcaaggatgcccaggctgggaaggagccaggggggagcagggctcactccagccacctgaagtccaaaaagggtcagtctacctcccgccataaaaaactcatgttcaagacagaagggcctgactcagactgacattctccacttcttgttccccactgacagcctcccacccccatctctccctcccctgccattttgggttttgggtctttgaacccttgcttgcaataggtgtgcgtcagaagcacccaggacttccatttgctttgtcccggggctccactgaacaagttggcctgcactggtgttttgttgtggggaggaggatggggagtaggacataccagcttagattttaaggtttttactgtgagggatgtttgggagatgtaagaaatgttcttgcagttaagggttagtttacaatcagccacattctaggtaggggcccacttcaccgtactaaccagggaagctgtccctcactgttgaattttctctaacttcaaggcccatatctgtgaaatgctggcatttgcacctacctcacagagtgcattgtgagggttaatgaaataatgtacatctggccttgaaaccaccttttattacatggggtctagaacttgacccccttgagggtgcttgttccctctccctgttggtcggtgggttggtagtttctacagttgggcagctggttaggtagagggagttgtcaagtctctgctggcccagccaaaccctgtctgacaacctcttggtgaaccttagtacctaaaaggaaatctcaccccatcccacaccctggaggatttcatctcttgtatatgatgatctggatccaccaagacttgttttatgctcagggtcaatttcttttttcttttttttttttttttttctttttctttgagactgggtctcgctttgttgcccaggctggagtggagtggcgtgatcttggcttactgcagcctttgcctccccggctcgagcagtcctgcctcagcctccggagtagctgggaccacaggttcatgccaccatggccagccaacttttgcatgttttgtagagatggggtctcacagtgttgcccaggctggtctcaaactcctgggctcaggcgatccacctgtctcagcctcccagagtgctgggattacaattgtgagccaccacgtccagctggaagggtcaacatcttttacattctgcaagcacatctgcattttcaccccacccttcccctccttctccctttttatatcccatttttatatcgatctcttattttacaataaaactttgctgccacctgtgtgtctgaggggtgtctccttcccggccagtgtgcagctgcacacggcggtggagatgcaccactggtgcatccccttctctgtggatgggcagccggcaccgtctctgcgctggctcttcaatggctccgtgctcaatgagaccagcttcatcttcactgagttcctggagccggcagccaatgagaccgtgcggcacgggtgtctgcgcctcaaccagcccacccacgtcaacaacggcaactacacgctgctggctgccaaccccttcggccaggcctccgcctccatcatggctgccttcatggacaaccctttcgagttcaaccccgaggaccccatccctgtctccttctcgccggtggacactaacagcacatctggagacccggtggagaagaaggacgaaacaccttttggggtctcggtggctgtgggcctggccgtctttgcctgcctcttcctttctacgctgctccttgtgctcaacaaatgtggacggagaaacaagtttgggatcaaccgcccggctgtgctggctccagaggatgggctggccatgtccctgcatttcatgacattgggtggcagctccctgtcccccaccgagggcaaaggctctgggctccaaggccacatcatcgagaacccacaatacttcagtgatgcctgtgttcaccacatcaagcgccgggacatcgtgctcaagtgggagctgggggagggcgcctttgggaaggtcttccttgctgagtgccacaacctcctgcctgagcaggacaagatgctggtggctgtcaaggcactgaaggaggcgtccgagagtgctcggcaggacttccagcgtgaggctgagctgctcaccatgctgcagcaccagcacatcgtgcgcttcttcggcgtctgcaccgagggccgccccctgctcatggtctttgagtatatgcggcacggggacctcaaccgcttcctccgatcccatggacctgatgccaagctgctggctggtggggaggatgtggctccaggccccctgggtctggggcagctgctggccgtggctagccaggtcgctgcggggatggtgtacctggcgggtctgcattttgtgcaccgggacctggccacacgcaactgtctagtgggccagggactggtggtcaagattggtgattttggcatgagcagggatatctacagcaccgactattaccgtgtgggaggccgcaccatgctgcccattcgctggatgccgcccgagagcatcctgtaccgtaagttcaccaccgagagcgacgtgtggagcttcggcgtggtgctctgggagatcttcacctacggcaagcagccctggtaccagctctccaacacggaggcaatcgactgcatcacgcagggacgtgagttggagcggccacgtgcctgcccaccagaggtctacgccatcatgcggggctgctggcagcgggagccccagcaacgccacagcatcaaggatgtgcacgcccggctgcaagccctggcccaggcacctcctgtctacctggatgtcctgggctagggggccggcccaggggctgggagtggttagccggaatactggggcctgccctcagcatcccccatagctcccagcagccccagggtgatctcaaagtatctaattcaccctcagcatgtgggaagggacaggtgggggctgggagtagaggatgttcctgct

SEQ ID NO: 62 - DNA, 2651 bp, Homo sapiens
gatgggattggggttttcccctcccatgtgctcaagactggcgctaaaagttttgagcttctcaaaagtctagagccaccgtccagggagcaggtagctgctgggctccggggacactttgcgttcgggctgggagcgtgctttccacgacggtgacacgcttccctggattggcagccagactgccttccgggtcactgccatggaggagccgcagtcagatcctagcgtcgagccccctctgagtcaggaaacattttcagacctatggaaactacttcctgaaaacaacgttctgtcccccttgccgtcccaagcaatggatgatttgatgctgtccccggacgatattgaacaatggttcactgaagacccaggtccagatgaagctcccagaatgccagaggctgctccccccgtggcccctgcaccagcagctcctacaccggcggcccctgcaccagccccctcctggcccctgtcatcttctgtcccttcccagaaaacctaccagggcagctacggtttccgtctgggcttcttgcattctgggacagccaagtctgtgacttgcacgtactcccctgccctcaacaagatgttttgccaactggccaagacctgccctgtgcagctgtgggttgattccacacccccgcccggcacccgcgtccgcgccatggccatctacaagcagtcacagcacatgacggaggttgtgaggcgctgcccccaccatgagcgctgctcagatagcgatggtctggcccctcctcagcatcttatccgagtggaaggaaatttgcgtgtggagtatttggatgacagaaacacttttcgacatagtgtggtggtgccctatgagccgcctgaggttggctctgactgtaccaccatccactacaactacatgtgtaacagttcctgcatgggcggcatgaaccggaggcccatcctcaccatcatcacactggaagactccagtggtaatctactgggacggaacagctttgaggtgcgtgtttgtgcctgtcctgggagagaccggcgcacagaggaagagaatctccgcaagaaaggggagcctcaccacgagctgcccccagggagcactaagcgagcactgcccaacaacaccagctcctctccccagccaaagaagaaaccactggatggagaatatttcacccttcagatgctacttgacttacgatggtgttacttcctgataaactcgtcgtaagttgaaaatattatccgtgggcgtgagcgcttcgagatgttccgagagctgaatgaggccttggaactcaaggatgcccaggctgggaaggagccaggggggagcagggctcactccagccacctgaagtccaaaaagggtcagtctacctcccgccataaaaaactcatgttcaagacagaagggcctgactcagactgacattctccacttcttgttccccactgacagcctcccacccccatctctccctcccctgccattttgggttttgggtctttgaacccttgcttgcaataggtgtgcgtcagaagcacccaggacttccatttgctttgtcccggggctccactgaacaagttggcctgcactggtgttttgttgtggggaggaggatggggagtaggacataccagcttagattttaaggtttttactgtgagggatgtttgggagatgtaagaaatgttcttgcagttaagggttagtttacaatcagccacattctaggtaggggcccacttcaccgtactaaccagggaagctgtccctcactgttgaattttctctaacttcaaggcccatatctgtgaaatgctggcatttgcacctacctcacagagtgcattgtgagggttaatgaaataatgtacatctggccttgaaaccaccttttattacatggggtctagaacttgacccccttgagggtgcttgttccctctccctgttggtcggtgggttggtagtttctacagttgggcagctggttaggtagagggagttgtcaagtctctgctggcccagccaaaccctgtctgacaacctcttggtgaaccttagtacctaaaaggaaatctcaccccatcccacaccctggaggatttcatctcttgtatatgatgatctggatccaccaagacttgttttatgctcagggtcaatttcttttttcttttttttttttttttttctttttctttgagactgggtctcgctttgttgcccaggctggagtggagtggcgtgatcttggcttactgcagcctttgcctccccggctcgagcagtcctgcctcagcctccggagtagctgggaccacaggttcatgccaccatggccagccaacttttgcatgttttgtagagatggggtctcacagtgttgcccaggctggtctcaaactcctgggctcaggcgatccacctgtctcagcctcccagagtgctgggattacaattgtgagccaccacgtccagctggaagggtcaacatcttttacattctgcaagcacatctgcattttcaccccacccttcccctccttctccctttttatatcccatttttatatcgatctcttattttacaataaaactttgctgccacctgtgtgtctgaggggtg

SEQ ID NO: 63 - protein, 346 aa, Homo sapiens
MEEPQSDPSVEPPLSQETFSDLWKLLPENNVLSPLPSQAMDDLMLSPDDIEQWFTEDPGPDEAPRMPEAAPPVAPAPAAPTPAAPAPAPSWPLSSSVPSQKTYQGSYGFRLGFLHSGTAKSVTCTYSPALNKMFCQLAKTCPVQLWVDSTPPPGTRVRAMAIYKQSQHMTEVVRRCPHHERCSDSDGLAPPQHLIRVEGNLRVEYLDDRNTFRHSVVVPYEPPEVGSDCTTIHYNYMCNSSCMGGMNRRPILTIITLEDSSGNLLGRNSFEVRVCACPGRDRRTEEENLRKKGEPHHELPPGSTKRALPNNTSSSPQPKKKPLDGEYFTLQMLLDLRWCYFLINSS

SEQ ID NO: 64 - DNA, 5361 bp, Homo sapiens
attgcgtcccgctctacctctgtggttctttgggagcgacccccgggaagcgtccaaagtggagttcccacacacgctgcgaacccacagccggttttctctgaactcgcgtccctgagtccgggaggtggaggcggagaaaagggtgcggagcgaccccacgcagggccgccccccctcccaccagcgcgtcctgccgcgccggcagccacaggctggcatagcggctgccgacccgccctcgttcctccaccccctgaacgggactgctgggcccgccccgccccgcctgcaggtgaagcggccgcagccgccgagtaggtgcgtggggatgatctcactcgcgcgctccgcgccaggaggaggaggagcgggagcggatccaacttccgggtagtggagccgcaagccaccggcatcttgctttttcttccccctcctcctgtgtgccccgcgccgctccctctttcccttttattcccggccccacccgccaaaatgaacagctcggacgaagagaagcagctgcagctcattaccagtctgaaggagcaagcaataggcgaatatgaagaccttagagcagagaaccagaaaacaaaggagaagtgtgacaaaattaggcaagaacgagatgaagccgttaaaaaactggaagaatttcagaaaatttctcacatggtcatagaggaagttaatttcatgcagaaccatcttgaaatagagaagacttgtcgagaaagtgctgaagctttggcaacaaagctaaataaagaaaataaaacgttgaaaagaatcagcatgttgtacatggccaagctgggaccagatgtaataactgaagagataaacattgatgatgaagattcgactacagacacagacggtgccgccgagacttgtgtctcagtacagtgtcagaagcaaattaaagaacttcgagatcaaattgtatctgttcaggaggaaaagaagattttagccattgagctggaaaatctcaagagcaaactcgtagaagtaattgaagaagtaaataaagttaaacaagaaaagactgttttaaattcagaagttcttgaacagagaaaagtcttagaaaaatgcaatagagtgtccatgttagctgtagaagagtatgaggagatgcaagtaaacctggagctggagaaggaccttcgaaagaaagcagagtcatttgcacaagagatgttcattgagcaaaacaagctaaagagacaaagccaccttctgctgcagagctccatccctgatcagcagcttttgaaagctttagacgaaaatgcaaaactcacccagcaacttgaagaagagagaattcagcatcaacaaaaggtcaaagaattagaagagcaactagaaaatgaaacactccacaaagaaatacacaacctcaaacagcaactggagcttctagaggaagataaaaaggaattggaattgaaatatcagaattctgaagagaaagccagaaatttaaagcactctgttgatgaactccagaaacgagtgaaccagtctgagaattcagtacctccaccacctcctcctccaccaccacttccccctccacctcccaatcctatccgatccctcatgtccatgatccggaaacgatcccaccccagtggcagtggtgctaagaaagaaaaggcaactcaaccagaaacaactgaagaagtcacagatctaaagaggcaagcagttgaagagatgatggatagaattaaaaagggagttcatcttagacccgttaatcagacagccagaccgaagacaaagccagaatcttcgaaaggctgcgaaagtgcagtggatgaactaaaaggaatactggggacacttaacaaatccactagttcaagaagcttaaaatcccttgaccctgaaaacagtgaaactgagttagaaaggattttgcgtcgcagaaaggtgacagcagaagcagatagcagtagtccaactgggatattagccacctcagagtccaaatccatgccagtgttgggttctgtatccagtgtaacaaaaacagccttgaacaagaaaactctggaggcagaattcaacagcccgtcccccccaacacctgagccaggtgaagggccccgtaaattggaaggatgcacaagttccaaggttacgtttcagcctcccagtagcattggatgcaggaaaaaatacattgacggtgaaaaacaagccgaaccagttgtagttttagatcctgtttctacacatgaaccccaaaccaaagaccaggttgctgaaaaagatccaactcaacacaaggaggatgaaggcgaaattcaaccagaaaacaaagaagacagcattgaaaacgtgagagagacagacagctccaactgctgatccataaaccagaagcctgacatgtttggaagtccttttcaataagcacatgattagtgttgttatattggcaagggctgtagacattctgctctggtcactgtattcagaatacaggttcttttctggtgtcacttttgtaagtagcaactataaacataagtaagctgtttagcaaaacacacattcctagtaggttttggttttttgatctttataaagatgaggtttttttcctagttactgtattaagtatgacttcttttagaaggttacaaaaaaattcagatgttgatacctttttaggaaatgtgcataccactcatcaaatggaatgctgaaagtttgaggtgcttgtatataatcggataaacaaaactgatcaacccaatgtgattttaaaagcccccaaagaagcttctgttttgggtctgatcctcttgatggagaaactgcagcagcatggaaattgttgggtactgtggcatacaagttattttctacagtagactgagataaactgaaaactcaggagctggcatcaaactcgtagtcccatagtcagtgttaattacacacattgttaactattggatgaaaaatacatgctattgattgtgtccaaagcctcccgaggacctccgtggggatgctctggtagcctgaatacagaactgaggtgaaagtccaaaccttgaattttacagtagtaagttggtaaaccatgtgctctgtgctatgagttaattatgttttcccaaatactaatgtggcacaagtaccatattttatcagagttcttatgtacagtatggtgaagataagtgacaagcacacatttttcttgcttcactgctgttctatattacacaggtttgttgttgttttttttaaaaaagaaattaagcagtagttagtctctaaaaatacaatgtttcaggctaccacagtgaataaatagaaatgtaatcagggattaaaaaaaaaacttatgcagcttttcaaagttgattgtttcaaaattggtgtttatttaaaataagtggtaatgtacttgaatgcactttttatgacaatgattcagtaatggtaattttactattaaagaaagtgaaaggtttagttttgttagcatggctcagcatgtagctgtcaggtgtttttcacctaagggcaaaagaaaatgatagtaataattgcagtagttgtattgtattgtatttttgcacgtgtggtaagcataggcttgaagaggtgggtaggcaggtacatgtacttcctaaatttggagataattatctttctgtaagttcgttatgcttgactgtttccatgttctcccaataatgattttatagttacttatcactttactcatggagaattaaaacgtaatgtttttcaactgtatctttctttaactggataatactgctatatgatatgcttactacagactgcattaattcacgaaacgaattctgttatgctgtaatttgaactctcctcaccacaacttattaaaaaggcaccaatagtttcccattaagggtcagttgtggttattattaacgtttctggtttagttccccaagcttgacattctttaatagaaaattgtatatgatttgacaactttagtaatttttaatagtccctaagatggtttattgagttttctttcatgtttctttgtgctgtcttccttcttgcatctgtgatctgtctgccagcatgcaactcacacacatttaggaatataaaaatatgtacactgtctttccatatttcatcacaccatcacagaataatatggttatcaaaataccctcctttctagagtaagaagttgccctttgggtgaaatgtgttagctggactagggaacaattagtaacaggtattttgaaagtattcctgccttttttaagctgcttactttctctcactgtgattacaaagcattttaaattaatttgacatgaaggtatttgatggaagatattcactcacctttttctgcctacagtttttcccttttcactttggttttgagggggttttgcccctggctggggtgacactgtcaaccaaagcaagggatcccaaataggaagacataggagaaccgtgcttatatctgcaaggtatgttcatagctattgcacacacaaaacttacatacgtcctgcttacacaattttaagttggaaaagactgcatctttatgtttttgatttctctaaaaggttatttatgcttccttctgtttgggaaagataaattaagtcttgtgcgctatagaggattttttttctttaagaaaaacgaatgttgatgcattttatagcccgagtgaggaacagagatagaggtactttgtgccattgctattaaagaaaaagaaaatgtctctttttttttctggaagaataagattttaattaaagcacttgcacccttttgtatgtgagctggtctcaaacaaagtcctcacccacagcagtttcagcagctgaacagtcccatggaagttctgactggcaggcatcaacagggctattagcacccagcatagtttgccctgagtacggaggatggatgctttggctctaactactcaccaataattgctccttccttaccttctttgttaatggtaaactgctggaaatggagtagtacaggtaacaattatttttaattgtctttccagaccagtttttggttgtgtgttcagtaaatgatagtctgtatcacagccttcaagtctggattatttttctaaatgcatactctacctgttcagttacactcgttgtggaacaacattagcttatataccagtaagttgtcgagaatggataaccatctgtcattatcactgaccttcaaagactcatcaagcagtccctgcataaggattggagtggtttgaagtttctcttccaagcactaacatgtccc

SEQ ID NO: 65 - protein, 631 aa, Homo sapiens
MNSSDEEKQLQLITSLKEQAIGEYEDLRAENQKTKEKCDKIRQERDEAVKKLEEFQKISHMVIEEVNFMQNHLEIEKTCRESAEALATKLNKENKTLKRISMLYMAKLGPDVITEEINIDDEDSTTDTDGAAETCVSVQCQKQIKELRDQIVSVQEEKKILAIELENLKSKLVEVIEEVNKVKQEKTVLNSEVLEQRKVLEKCNRVSMLAVEEYEEMQVNLELEKDLRKKAESFAQEMFIEQNKLKRQSHLLLQSSIPDQQLLKALDENAKLTQQLEEERIQHQQKVKELEEQLENETLHKEIHNLKQQLELLEEDKKELELKYQNSEEKARNLKHSVDELQKRVNQSENSVPPPPPPPPPLPPPPPNPIRSLMSMIRKRSHPSGSGAKKEKATQPETTEEVTDLKRQAVEEMMDRIKKGVHLRPVNQTARPKTKPESSKGCESAVDELKGILGTLNKSTSSRSLKSLDPENSETELERILRRRKVTAEADSSSPTGILATSESKSMPVLGSVSSVTKTALNKKTLEAEFNSPSPPTPEPGEGPRKLEGCTSSKVTFQPPSSIGCRKKYIDGEKQAEPVVVLDPVSTHEPQTKDQVAEKDPTQHKEDEGEIQPENKEDSIENVRETDSSNC

SEQ ID NO: 66 - DNA, 4518 bp, Homo sapiens
agaggctagcacggttcctgacaagtctagagcagcactagcgcagagtgagactcatcagctggcaagcaggattctgtgtctctgggttcaggaatcctcaggcagcagaggggacttgctcctcagcccccatcactgcccccacccctacccgtgtaggccaccgagtgaggcccatggactggggagggctgtgcctgacgactcctgtgtccctctatgagggcccagcgccctgaccctcctgcctaggtttctaccttttctctctgtctttggccagctgggggagggggtagaggccgggtgagcaacatggcacagagcaagaggcacgtgtacagccggacgcccagcggcagcaggatgagtgcggaggcaagcgcccggcctctgcgggtgggctcccgtgtagaggtgattggaaaaggccaccgaggcactgtggcctatgttggagccacactgtttgccactggcaaatgggtaggcgtgattctggatgaagcaaagggcaaaaatgatggaactgttcaaggcaggaagtacttcacttgtgatgaagggcatggcatctttgtgcgccagtcccagatccaggtatttgaagatggagcagatactacttccccagagacacctgattcttctgcttcaaaagtcctcaaaagagagggaactgatacaactgcaaagactagcaaactgcggggactgaagcctaagaaggcaccgacagcccgaaagaccacaactcggcgacccaagcccacgcgcccagccagtactggggtggctggggccagtagctccctgggcccctctggctcagcgtcagcaggtgagctgagcagcagtgagcccagcaccccggctcagactccgctggcagcacccatcatccccacgccggtcctcacctctcctggagcagtccccccgcttccttccccatccaaggaggaggagggactaagggctcaggtgcgggacctggaggagaaactagagaccctgagactgaaacgggcagaagacaaagcaaagctaaaagagctggagaaacacaaaatccagctggagcaggtgcaggaatggaagagcaaaatgcaggagcagcaggccgacctgcagcggcgcctcaaggaggcgagaaaggaagccaaggaggcgctggaggcaaaggaacgctatatggaggagatggctgatactgctgatgccattgagatggccactttggacaaggagatggctgaagagcgggctgagtccctgcagcaggaggtggaggcactgaaggagcgggtggacgagctcactactgacttagagatcctcaaggctgagattgaagagaagggctcagatggcgctgcatccagttatcagctcaagcagcttgaggagcagaatgcccgcctgaaggatgccctggtgaggatgcgggatctttcttcctcagagaagcaggagcatgtgaagctccagaagctcatggaaaagaagaaccaagagctggaagttgtgaggcaacagcgggagcgtctgcaggaggagctaagccaggcagagagcaccattgatgagctcaaggagcaggtggatgctgctctgggtgctgaggagatggtggagatgctgacagatcggaacctgaatctggaagagaaagtgcgcgagttgagggagactgtgggagacttggaagcgatgaatgagatgaacgatgagctgcaggagaatgcacgtgagacagaactggagctgcgggagcagctggacatggcaggcgcgcgggttcgtgaggcccagaagcgtgtggaggcagcccaggagacggttgcagactaccagcagaccatcaagaagtaccgccagctgaccgcccatctacaggatgtgaatcgggaactgacaaaccagcaggaagcatctgtggagaggcaacagcagccacctccagagacctttgacttcaaaatcaagtttgctgagactaaggcccatgccaaggcaattgagatggaattgaggcagatggaggtggcccaggccaatcgacacatgtccctgctgacagccttcatgcctgacagcttccttcggccaggtggggaccatgactgcgttctggtgctgttgctcatgcctcgtctcatttgcaaggcagagctgatccggaagcaggcccaggagaagtttgaactaagtgagaactgttcagagcggcctgggctgcgaggagctgctggggagcaactcagctttgctgctggactggtgtactcgctgagcctgctgcaggccacgctacaccgctatgagcatgccctctctcagtgcagtgtggatgtgtataagaaagtgggcagcctgtaccctgagatgagtgcccatgagcgctccttggatttcctcattgaactgctgcacaaggatcagctggatgagactgtcaatgtggagcctctcaccaaggccatcaagtactatcagcatctgtacagcatccaccttgccgaacagcctgaggactgtactatgcagctggctgaccacattaagttcacgcagagtgctctggactgcatgagtgtggaggtaggacggctgcgtgccttcttgcagggtgggcaggaggctacagatattgccctcctgctccgggatctggaaacttcatgcagtgacatccgccagttctgcaagaagatccgaaggcgaatgccagggacagatgctcctgggatcccagctgcactggcctttggaccacaggtatctgacacgctcctagactgcaggaaacacttgacgtgggtcgtggctgtgctgcaggaggtggcagctgctgctgcccagctcattgccccactggcagagaatgaggggctacttgtggctgctctggaggaactggctttcaaagcaagcgagcagatctatgggaccccctccagcagcccctatgagtgtctgcgccagtcatgcaacatcctcatcagtaccatgaacaagctggccacagccatgcaggagggggagtatgatgcagagcggccccccagcaagcctccaccggttgaactgcgggctgctgcccttcgtgcagagatcacagatgctgaaggcctgggtttgaagctcgaagatcgagagacagttattaaggagttgaagaagtcactcaagattaagggagaggagctaagtgaggccaatgtgcggctgagcctcctggagaagaagttggacagtgctgccaaggatgcagatgagcgcatcgagaaagtccagactcggctggaggagacccaggcactgctgcgaaagaaggagaaagagtttgaggagacaatggatgcactccaggctgacatcgaccagctggaggcagagaaggcagaactaaagcagcgtctgaacagccagtccaaacgcacgattgagggactccggggccctcctccttcaggcattgctactctggtctctggcattgctggtgaagaacagcagcgaggagccatccctgggcaggctccagggtctgtgccaggcccagggctggtgaaggactcaccactgctgcttcagcagatctctgccatgaggctgcacatctcccagctccagcatgagaacagcatcctcaagggagcccagatgaaggcatccttggcatccctgccccctctgcatgttgcaaagctatcccatgagggccctggcagtgagttaccagctggagcgctgtatcgtaagaccagccagctgctggagacattgaatcaattgagcacacacacgcacgtagtagacatcactcgcaccagccctgctgccaagagcccgtcggcccaacttatggagcaagtggctcagcttaagtccctgagtgacaccgtcgagaagctcaaggatgaggtcctcaaggagacagtatctcagcgccctggagccacagtacccactgactttgccaccttcccttcatcagccttcctcagggccaaggaggagcagcaggatgacacagtctacatgggcaaagtgaccttctcatgtgcggctggttttggacagcgacaccggctggtgctgacccaggagcagctgcaccagcttcacagtcgcctcatctcctaagcactcctttcccctgctgtccccttcgaccctcagccctctggtgccgctctgcccgatgcacagccacctcagccagcccccaggtagaaacgtgggttaagctcttcctgccccgttcagcttcactcccaccctttcagcgtcctgccccttcaccttgacccgggttcccccactcccattccctggcctctgccataatttgttgttcaactgctccctccttcctgaggggcctcagggcttgtggggggtaggctgagaccccaccaccaaaggttaagtgaggtccccttgattgaggacttcaccccttgattaaagcaacttctgcttcagtgcaaaaaaaaaaaaaaaaaa

SEQ ID NO: 67 - protein, 1278 aa, Homo sapiens
MAQSKRHVYSRTPSGSRMSAEASARPLRVGSRVEVIGKGHRGTVAYVGATLFATGKWVGVILDEAKGKNDGTVQGRKYFTCDEGHGIFVRQSQIQVFEDGADTTSPETPDSSASKVLKREGTDTTAKTSKLRGLKPKKAPTARKTTTRRPKPTRPASTGVAGASSSLGPSGSASAGELSSSEPSTPAQTPLAAPIIPTPVLTSPGAVPPLPSPSKEEEGLRAQVRDLEEKLETLRLKRAEDKAKLKELEKHKIQLEQVQEWKSKMQEQQADLQRRLKEARKEAKEALEAKERYMEEMADTADAIEMATLDKEMAEERAESLQQEVEALKERVDELTTDLEILKAEIEEKGSDGAASSYQLKQLEEQNARLKDALVRMRDLSSSEKQEHVKLQKLMEKKNQELEVVRQQRERLQEELSQAESTIDELKEQVDAALGAEEMVEMLTDRNLNLEEKVRELRETVGDLEAMNEMNDELQENARETELELREQLDMAGARVREAQKRVEAAQETVADYQQTIKKYRQLTAHLQDVNRELTNQQEASVERQQQPPPETFDFKIKFAETKAHAKAIEMELRQMEVAQANRHMSLLTAFMPDSFLRPGGDHDCVLVLLLMPRLICKAELIRKQAQEKFELSENCSERPGLRGAAGEQLSFAAGLVYSLSLLQATLHRYEHALSQCSVDVYKKVGSLYPEMSAHERSLDFLIELLHKDQLDETVNVEPLTKAIKYYQHLYSIHLAEQPEDCTMQLADHIKFTQSALDCMSVEVGRLRAFLQGGQEATDIALLLRDLETSCSDIRQFCKKIRRRMPGTDAPGIPAALAFGPQVSDTLLDCRKHLTWVVAVLQEVAAAAAQLIAPLAENEGLLVAALEELAFKASEQIYGTPSSSPYECLRQSCNILISTMNKLATAMQEGEYDAERPPSKPPPVELRAAALRAEITDAEGLGLKLEDRETVIKELKKSLKIKGEELSEANVRLSLLEKKLDSAAKDADERIEKVQTRLEETQALLRKKEKEFEETMDALQADIDQLEAEKAELKQRLNSQSKRTIEGLRGPPPSGIATLVSGIAGEEQQRGAIPGQAPGSVPGPGLVKDSPLLLQQISAMRLHISQLQHENSILKGAQMKASLASLPPLHVAKLSHEGPGSELPAGALYRKTSQLLETLNQLSTHTHVVDITRTSPAAKSPSAQLMEQVAQLKSLSDTVEKLKDEVLKETVSQRPGATVPTDFATFPSSAFLRAKEEQQDDTVYMGKVTFSCAAGFGQRHRLVLTQEQLHQLHSRLIS

SEQ ID NO: 68 - DNA, 3772 bp, Homo sapiens
gccgccgccgccgccgccgccgcgccgcggcttgagggcgggaggctgggggagggtagcggagccggcgccgccgccatgttgggtctgaagcggctgctgtaggcgccgacggagcgagcgggcgtgcggagcgggcgacagtggcgtgggatctgcctctctgcgagcagctgggagcggcggcggcggcgccatgagcgggggcaccccttacatcggcagcaagatcagcctcatctccaaggcggagatccgctacgagggcatcctctacaccatcgacaccgaaaactccaccgtagcccttgccaaagttcgatcctttggtacagaagacagaccgacagatcgtccaataccacctcgagatgaagtctttgaatacattatattccgtgggagtgacattaaagaccttactgtttgtgagccaccaaaaccacagtgttctttgcctcaagacccagctattgttcagtcctcactaggctcatcgacttcttcattccagtccatgggttcttatggacctttcggcaggatgcccacatacagtcagttcagtccgagttccttagttgggcagcagtttggtgctgttggtgttgctggaagctctttgacatcctttggaacagaaacatcaaacagtggtaccttaccccaaagtagtgcggttggttctgcctttacacaggatacaagatctctaaaaacacagttatctcaaggtcgctcaagccctcagttagaccctttgagaaaaagcccaaccatggaacaagcagtgcagaccgcctcagcccacttacctgctccagcagctgttgggagaaggagtcctgtatcaaccaggcctttgccatctgccagccaaaaggcaggagagaatcaggagcacaggcgagctgaagtacacaaagtttcaaggccagaaaatgagcaactcagaaatgataacaagagacaagtagctccaggtgctccttcagctccaaggagagggcgtgggggtcatcggggtggcaggggaagatttggtattcggcgagatgggccaatgaaatttgagaaagactttgactttgaaagtgcaaatgcacaattcaacaaggaagagattgacagagagtttcataataaacttaaattaaaagaagataaacttgagaaacaggagaagcctgtaaatggtgaagataaaggagactcaggagttgatacccaaaacagtgaaggaaatgccgatgaagaagatccacttggacctaattgctattatgacaaaactaaatccttctttgataatatttcttgtgatgacaatagagaacggagaccaacctgggctgaagaaagaagattaaatgctgaaacatttggaatcccacttcgtccaaaccgtggccgtgggggatacagaggcagaggaggtcttggtttccgtggtggcagagggcgtggtggtggcagaggtggtaccttcactgcccctcgaggatttcgcggtggattcagaggaggtcgtgggggccgggagtttgcggattttgaatataggaaaaccacagcttttggaccctaaaaggtctggattgatcgtactgctttctgaaagaaagacaacaaagttgctgcatagtctacaaacaagtctctgaaaataggtgaatttctagctcttcatggtcctgaacattgatttcagtctttgcaaagaatgaagaagtgaattcgctgtacatttgtcaccagcactgggtttttgttttttgtttgtttttccgcttaatttcaaagataaaatgcagttacttttgggggtggaaggctcatcttaaaacatgagcattaaatatatttggaatagcagaaggttaagtaatttcttatgtatagttaaactaaagcagtacttcagtgggacttaacaagtattttttcatcactgaaaggttttttttttttatcactaaattgtatttggcaattgcaagttgcctgcagatagggccgtgatactgtgttttgagccacagaaggttgtgtgtgtgtgtgtgtgtgtgtgtgtgtgtgtgtgtgtatgtgtgtgtctttttcctcctttcttttggggaatcctgtaatatgaggtagcttatttcgtcaattaattagggtgctggatggtagagaattttgtcagtcaactatgtacacacagtaaatactgtttcttaggcaaaggtaacttttttatatagttgtaaaattccattatattccattgccaaagaaacattaagaactttgtatagctgtataaaaagcaactaattttttaaagaataaacattttaaagtcagcaaacatactgtgtccttgcagaagttgatgtgctgagcagcagccttatgggtgggtctttttttcttagttttccaggcttaacatttttgattttgttttttaatgtttggaacataaatgaagatttgatacattatttcattatctaaaaaggattaattattcatgctcattgtaagaacttcattttgtagcaaatggcatatcacaggatctgtccagataatcgatattttcagtatacaaatgtaaataatcacagatgagaatgtacttagctgtattttcaaataagtaatcttccccccttttgtaggactttaaaactaggcatcaatgaacctgtttttcctattatgcctggaatttagtcatgataccttgactcattccatcatatttcaagaggattcagagtgctagaaattattttggtagcctgtaacacacggcaacactggtccttgggcctatgatgacccacagatgactcagtatagagttcattgctaattataaattactagtgaatctttttgatattttaagctctagtgggaaaaatctggccacttttgtgtttttatgaaggccatggaataaaaggatccaaagatttaaatatttttatctaatattttgattgttttcttaactttctccttaaaacattcagtagtgataaagatatagaaactgcactgtaggagaattggaatatttaaggctggttgacattttttattttcattttatatcttttgtatagctctacaaggcagtgttttgtaatttggtttcattatgaagatccagtacttggcagccatagtttagacaatattgttcagtgctgtttgcttgcatgttaacaacaaaaccttttagaggacccacaaatcatgatattgaacacagttccgaggcattcagagcatcagagcaagtaccatggcaatacatgtgtagactgttggagatgtcccgggccaatttcaagaaagaaaactgtaaatactagttctacttgctctgaaattatgagtttatgcgttttcccagccctccgaatcactgactggggcgttttgtgccccagcaataactggcagcatggcatacctgcagtaccccttacaatattaaagcaaagtttttattctaaaacagaataaaactgttcaataaaaaatgctcgtcaaagttctttctctttaaatagtaacattctgtttcagtaggaacataatgaaaggaatcttttaaatggaagagcggaattataatgtttgtattccctgtaataactataaatcagttactttatttctaagattgagttattgttgcagatgtttagggaaagctaaaagccccttccttcccctcctgtgtgtaaataaaatacttctgagatca

SEQ ID NO: 69 - protein, 463 aa, Homo sapiens
MSGGTPYIGSKISLISKAEIRYEGILYTIDTENSTVALAKVRSFGTEDRPTDRPIPPRDEVFEYIIFRGSDIKDLTVCEPPKPQCSLPQDPAIVQSSLGSSTSSFQSMGSYGPFGRMPTYSQFSPSSLVGQQFGAVGVAGSSLTSFGTETSNSGTLPQSSAVGSAFTQDTRSLKTQLSQGRSSPQLDPLRKSPTMEQAVQTASAHLPAPAAVGRRSPVSTRPLPSASQKAGENQEHRRAEVHKVSRPENEQLRNDNKRQVAPGAPSAPRRGRGGHRGGRGRFGIRRDGPMKFEKDFDFESANAQFNKEEIDREFHNKLKLKEDKLEKQEKPVNGEDKGDSGVDTQNSEGNADEEDPLGPNCYYDKTKSFFDNISCDDNRERRPTWAEERRLNAETFGIPLRPNRGRGGYRGRGGLGFRGGRGRGGGRGGTFTAPRGFRGGFRGGRGGREFADFEYRKTTAFGP

SEQ ID NO: 70 - DNA, 3239 bp, Homo sapiens
aggaggacctattagagcctttgccccggcgtcggtgactcagtgttcgcgggagcgccgcacctacaccagccaacccagatcccgaggtccgacagcgcccggcccagatccccacgcctgccaggagcaagccgagagccagccggccggcgcactccgactccgagcagtctctgtccttcgacccgagccccgcgccctttccgggacccctgccccgcgggcagcgctgccaacctgccggccatggagaccccgtcccagcggcgcgccacccgcagcggggcgcaggccagctccactccgctgtcgcccacccgcatcacccggctgcaggagaaggaggacctgcaggagctcaatgatcgcttggcggtctacatcgaccgtgtgcgctcgctggaaacggagaacgcagggctgcgccttcgcatcaccgagtctgaagaggtggtcagccgcgaggtgtccggcatcaaggccgcctacgaggccgagctcggggatgcccgcaagacccttgactcagtagccaaggagcgcgcccgcctgcagctggagctgagcaaagtgcgtgaggagtttaaggagctgaaagcgcgcaataccaagaaggagggtgacctgatagctgctcaggctcggctgaaggacctggaggctctgctgaactccaaggaggccgcactgagcactgctctcagtgagaagcgcacgctggagggcgagctgcatgatctgcggggccaggtggccaagcttgaggcagccctaggtgaggccaagaagcaacttcaggatgagatgctgcggcgggtggatgctgagaacaggctgcagaccatgaaggaggaactggacttccagaagaacatctacagtgaggagctgcgtgagaccaagcgccgtcatgagacccgactggtggagattgacaatgggaagcagcgtgagtttgagagccggctggcggatgcgctgcaggaactgcgggcccagcatgaggaccaggtggagcagtataagaaggagctggagaagacttattctgccaagctggacaatgccaggcagtctgctgagaggaacagcaacctggtgggggctgcccacgaggagctgcagcagtcgcgcatccgcatcgacagcctctctgcccagctcagccagctccagaagcagctggcagccaaggaggcgaagcttcgagacctggaggactcactggcccgtgagcgggacaccagccggcggctgctggcggaaaaggagcgggagatggccgagatgcgggcaaggatgcagcagcagctggacgagtaccaggagcttctggacatcaagctggccctggacatggagatccacgcctaccgcaagctcttggagggcgaggaggagaggctacgcctgtcccccagccctacctcgcagcgcagccgtggccgtgcttcctctcactcatcccagacacagggtgggggcagcgtcaccaaaaagcgcaaactggagtccactgagagccgcagcagcttctcacagcacgcacgcactagcgggcgcgtggccgtggaggaggtggatgaggagggcaagtttgtccggctgcgcaacaagtccaatgaggaccagtccatgggcaattggcagatcaagcgccagaatggagatgatcccttgctgacttaccggttcccaccaaagttcaccctgaaggctgggcaggtggtgacgatctgggctgcaggagctggggccacccacagcccccctaccgacctggtgtggaaggcacagaacacctggggctgcgggaacagcctgcgtacggctctcatcaactccactggggaagaagtggccatgcgcaagctggtgcgctcagtgactgtggttgaggacgacgaggatgaggatggagatgacctgctccatcaccaccacggctcccactgcagcagctcgggggaccccgctgagtacaacctgcgctcgcgcaccgtgctgtgcgggacctgcgggcagcctgccgacaaggcatctgccagcggctcaggagcccaggtgggcggacccatctcctctggctcttctgcctccagtgtcacggtcactcgcagctaccgcagtgtggggggcagtgggggtggcagcttcggggacaatctggtcacccgctcctacctcctgggcaactccagcccccgaacccagagcccccagaactgcagcatcatgtaatctgggacctgccaggcaggggtgggggtggaggcttcctgcgtcctcctcacctcatgcccaccccctgccctgcacgtcatgggagggggcttgaagccaaagaaaaataaccctttggtttttttcttctgtatttttttttctaagagaagttattttctacagtggttttatactgaaggaaaaacacaagcaaaaaaaaaaaaaagcatctatctcatctatctcaatcctaatttctcctcccttccttttccctgcttccaggaaactccacatctgccttaaaaccaaagagggcttcctctagaagccaagggaaaggggtgcttttatagaggctagcttctgcttttctgccctggctgctgcccccaccccggggaccctgtgacatggtgcctgagaggcaggcatagaggcttctccgccagcctcctctggacggcaggctcactgccaggccagcctccgagagggagagagagagagagaggacagcttgagccgggcccctgggcttggcctgctgtgattccactacacctggctgaggttcctctgcctgccccgcccccagtccccacccctgcccccagccccggggtgagtccattctcccaggtaccagctgcgcttgcttttctgtattttatttagacaagagatgggaatgaggtgggaggtggaagaagggagaagaaaggtgagtttgagctgccttccctagctttagaccctgggtgggctctgtgcagtcactggaggttgaagccaagtggggtgctgggaggagggagagggaggtcactggaaaggggagagcctgctggcacccaccgtggaggaggaaggcaagagggggtggaggggtgtggcagtggttttggcaaacgctaaagagcccttgcctccccatttcccatctgcaccccttctctcctccccaaatcaatacactagttgtttctacccctggcaaaaaaaaaaaa

SEQ ID NO: 71 - protein, 664 aa, Homo sapiens
METPSQRRATRSGAQASSTPLSPTRITRLQEKEDLQELNDRLAVYIDRVRSLETENAGLRLRITESEEVVSREVSGIKAAYEAELGDARKTLDSVAKERARLQLELSKVREEFKELKARNTKKEGDLIAAQARLKDLEALLNSKEAALSTALSEKRTLEGELHDLRGQVAKLEAALGEAKKQLQDEMLRRVDAENRLQTMKEELDFQKNIYSEELRETKRRHETRLVEIDNGKQREFESRLADALQELRAQHEDQVEQYKKELEKTYSAKLDNARQSAERNSNLVGAAHEELQQSRIRIDSLSAQLSQLQKQLAAKEAKLRDLEDSLARERDTSRRLLAEKEREMAEMRARMQQQLDEYQELLDIKLALDMEIHAYRKLLEGEEERLRLSPSPTSQRSRGRASSHSSQTQGGGSVTKKRKLESTESRSSFSQHARTSGRVAVEEVDEEGKFVRLRNKSNEDQSMGNWQIKRQNGDDPLLTYRFPPKFTLKAGQVVTIWAAGAGATHSPPTDLVWKAQNTWGCGNSLRTALINSTGEEVAMRKLVRSVTVVEDDEDEDGDDLLHHHHGSHCSSSGDPAEYNLRSRTVLCGTCGQPADKASASGSGAQVGGPISSGSSASSVTVTRSYRSVGGSGGGSFGDNLVTRSYLLGNSSPRTQSPQNCSIM

SEQ ID NO: 72 - DNA, 13546 bp, Homo sapiens
ggaggtcggcgcagctgcccctttgggctttggctctggactggagcgcagcatccttcgaggctgcagccgccacggctgttgccgtaagcaatcctcctgcctcagcctcccgagtagctgggactcgggaccagcctcccgagtattggtcagatgacatttaccatcaccgttttcttcttctttcatcatcatcatcatcaccattgccactaccaccacctccaaggccactaccaccacagcatctctgttcctccatcagagctcttcaagttctgtaaaggcagattctctaaaggcatgcctggtggcatcacgtttttcacatctccgcatctggaccctgcccaagcgaaggctgatctaggcagtctcattgctggagatgactgtcagctgctttctctgcatagccaccatcacatgcctcaccactggagcctgggaagcctgaccacaaaccggcatctccaaggcatgaataattaggtaggcataatggaaggcactcattgtaccctccaattgcataagcccattacggaactctgctacatcagcttctgtcttccaaagggggaagtcagaggattttcatacaagggcactgtaactctagacagatccaataaaggttttcataactgctaccaagtcagggaggagtcagacatcatcagcctcagccaggagccggacgaacatccaggcgacatatttttcaagcagactcccacgaaagacattctaactgagctgtacaaactcacaacagagagggagagactgctaaccaatctcctgagctcagaccacatcctggggatcacgatggggaaccaggaggggaagctgcaagagctgtccgtgagcctggcccccgaggatgactgtttccagagtgctggtgactggcagggagagctccccgtgggccctctcaataagaggagcacccacgggaacaaaaagcctcggaggtctagtggaaggagagagagctttggggcccttccacagaagaggaccaaaagaaaagggcgtggaggccgagaatcagctcctctgatgggcaaggacaagatctgttccagccactcccttcctctttctagaacaaggcctaacctttgggtactagaggagaaaggaaatctgctcccgaatggggcacttgcctgctccctgcagaggagagagagctgccccccagatattcccaagacgccagacacagaccttggctttgggagctttgagacggctttcaaggacactgggcttggaagagaagtgctgccccctgactgcagctccacagaggcaggaggggatggcattcggaggccgccgagcgggctggagcatcagcaaacaggtttgtctgaaagtcaccaggaccctgagaagcatccagaggcagaaaaggatgagatggagaagccggctaagcggacttgcaagcagaaacctgtctccaaagtggtggccaaagttcaggacctgtcctcccaggtacaaagagtagttaaaacgcattctaagggtaaggagacgattgccattcgcccagcagcccacgctgagtttgtacccaaagccgacttgctcaccctcccgggagctgaggctggggctcatggctccaggcggcagggcaaggagcggcaaggggataggtcatcgcagtcgccagccggggaaacagcctccatttctagtgtgtcggccagtgccgagggggccgtgaacaaggtccccctgaaggtgatagagagtgagaagttagatgaagcccctgaggggaaaagactgggcttccctgtccacacgagtgtccctcacactcgcccagaaacgagaaacaagaggagagccgggttgccccttggtggccacaagtccttgtttctggatctgccccacaaagtaggtcctgactcctcacaacccagaggtgataagaagaagccatccccaccagcaccggcagctcttggcaaggtgtttaataattcagcctcgcagtccagcacacacaaacagacgtcacctgttccctcgcctctgtctccaaggctccccagccctcagcagcatcacaggatcctccggctccctgcattgcctggtgagagggaagctgctcttaatgactctccttgtagaaagagccgtgtcttctctgggtgcgtctctgctgacaccttggagccaccatcctctgcaaaggtcacggagaccaaaggagccagcccggccttcctcagagcaggccaacctcggttggtgcctggggaaactttggaaaagagcttggggccagggaagaccacagctgagccccagcaccagtcacctccaggtatctcctctgagggctttccctgggacggcttcaatgagcagacacctaaagaccttcccaacagagatggaggcgcgtgggttctgggctacagagcgggaccagcctgtccatttttgcttcatgaggaaagggagaagtcaaacaggagcgaattgtacttggatctccatcctgaccacagcctgactgagcaggatgacaggactcctggcagacttcaagctgtctggccacccccaaagacaaaagacacagaagaaaaagtgggactgaagtacactgaagcagaataccaagctgctattttacacttgaagagggagcacaaagaagaaattgaaaacctgcaggcacagtttgaacttcgggcatttcatatccggggcgagcatgcaatgataacagcgagactagaagaaaccattgaaaatctgaaacacgagctagaacacagatggcgagggggttgtgaagagaggaaagatgtgtgcatttccaccgatgatgactgccctccaaagaccttcagaaatgtgtgcgtccagacagacagagagaccttcctcaagccctgtgaaagtgaaagcaagacaaccagaagtaatcaattagtacccaaaaagctgaatatctcctctttaagccagctctcacccccaaatgaccacaaagacatccatgcagcactccagccaatggagggcatggcatcaaatcagcagaaggcattgcctccgcctcccgcatccatccctccccctccgcccctcccctcaggacttggatctttgtctcccgcacctccaatgccacctgtgagtgctgggccaccgctaccacctccgcctcctccaccgccacctctacctccaccttcaagtgctggacctccaccacccccacccccacccccacttcctaactcccctgccccacccaaccctggagggcctcctcctgctccaccacccccaggacttgcacccccacctccccctggactcttctttggacttggctcttcttccagtcaatgtcctcgaaaaccagccatcgagcccagttgtcccatgaagcctttatattggactaggatacaaataagtgataggagccaaaatgctacaccaaccttatgggactccttagaagaacctgacattcgggaccccagtgaatttgagtatttattctccaaagacacaactcaacagaagaaaaaacctctgtcagagacttatgagaagaaaaacaaggtcaaaaagatcatcaaattgttggatggaaaacgatctcaaactgtgggaatcttgatatctagtttacatttagaaatgaaggatatccaacaggccattttcaatgtggatgactccgtggttgatctggagaccctggcagccttatatgaaaacagagcccaagaggatgagctggttaaaataagaaagtattacgagacatccaaagaagaagaactgaagctgctggataaacctgagcaatttttacatgagttagcccagattcctaattttgctgaacgtgcccagtgcataatcttcagatctgtcttttctgagggtatcacctccttgcacagaaaggtagagatcatcacgcgagcttctaaggacttgctgcacgtgaagagcgtgaaggatattttagctctcatcttggcttttggaaattatatgaatggaggaaataggactcggggacaagccgatggatatagcttagaaattctgcccaaactcaaggatgtcaaaagtcgggataatgggattaatctggtggactacgttgttaagtattacctgcgttactatgatcaggaagctggaacagaaaagagtgttttccccttgccggaaccacaggatttctttctggcctcccaagtcaagtttgaagacctcataaaagatttgagaaaactgaagaggcaactagaagcaagtgagaaacagatggtggtggtgtgcaaggagtccccaaaggagtatctccagcctttcaaggacaaactagaggagttcttccaaaaagccaaaaaagagcataagatggaagaaagtcacttggagaatgcacagaaaagttttgaaacaacagtacgatattttgggatgaagccaaagtctggtgagaaggagatcacacccagctacgtgtttatggtgtggtatgagttctgcagtgacttcaagacaatttggaaacgggagagtaaaaacatatctaaagaaagattgaaaatggctcaggaatcagtcagcaagttgacttcagagaagaaagtggagacaaagaaaatcaatcccactgctagcctgaaagaaagactgcgtcagaaggaagccagtgtgaccactaactaagatgaagacacatggaaatgatggcactggaggtggaggaccttgcacgcatactctttgtgaccacagggttgcaggacgttcttgaaagatgtgtcactaaatgtttgtttttgctcatctctttctgaggtcatctgcagagagtgccccatgccttctttaagaagtccctcattaagccgcaggaacaatggaaaactatttaagggaacattgcagaaatatttgatgactgtttcttgtggaagcccaaagtccactctaagagcagaagaaataccaaaatgtttccaaaatttttttaaaagctgagatttccagctttataaccaaagcttgatatatgtcacattgtcacagaagagagaaaagatcattgaggacagttgccttgggagagttcaagtctttgtcgttacacactgctgttttgattattggtcttagttttgatcctgttgcagcaaaatcctgcagcatctttctctccaataatgttgcaactcaccaaaactattcttgaagaggtccaagaacatgtattatccagactaaaaaaatgattttttgttgttatggtttacgtgatgaaaaggagaaaaaacagaatcatacctgggtggagagagggagacaaatagccataaacttcatcctggagaacaagttaccatgcaaggagttgacatcagttgttaagtgaggcccattcttgtttttacatcggtcctttgtggtttttctgggccagcagagattctgcaccccaactcccaggagaaaatgtaatacctgagcaagcacagccttgggtgtgcttggacaagagacccagcggcagagcaccttttacattttggaccgttcatgaatgggcaatgttgtgttgatacgcagccgagttctacgttatgtgctgtgactgtgcagctggacgacccccatccccaggaggcagtttccagacaggagagcaaatgcaactcacagcacctgctcatgaccttggctgataggcatgtgaagtaggatgaagcaggactctttaatgtcaaaaaaactgaagggcagaaaaaaggttccttacatcaaaatgaaagtaattacattaatagaaaacttccaagtggaatattgttcacaggcagctctttctgaccctggctcttgagtcacataaggaaaccacctttgacctctctgacacttttgtctttaagccacgtctctgaaatcttgtgaggggtgaagaaagaggactggagatgaatggacaatatgatcaaagactcatttttaggccttgaagaggccgagctttctccccccaattggtggaggacagtccagagatgagcagaaatcttaaattccttcctgatccagcctccacatgtggcctgccccttgccccagcatctttccagaacccctggacttgccaggtgcctgagcatcttcccaggatatgcctgccagccagcagcccctcaggaatgcttctataatagatccagtaatgaaagcagcaccatatcctaatctaatgtcagcttcgagaatgaagactgcagtcaggatcaaatcaagtcacagaagccatattcatgcaggtgctaaccgccttttctactggtgcaactgaaaggaatatggtaacatggttggatttttaaaattcacaatgaaggaacgagacaagcaaaacagaaaagccgagaaggaacatgcatgactaaaaaggcttgaagttgcttgtgagcaagaagctttttatgctgctttcttacatagtttctcttcattttcacttaactctgaagacaaccaaaagaacggatcaattaaaaactgattccacttataaccattgtatgctccttctagtgttatcatgcacaagaaaagtgccagttttacccatgccatataattcagctcttttgagttatgtggggccagcagaagtctcaatccttataggcttgatggtgagagcagcgggaggtttgaggtgtactcattgcagtccactttggtctgtaagtaggatgcttacgagaaatcagtgaaggtaagcagggctgccactgtggccacgtaacccttcaggaaccagtgctgaagaataatgagtgagaacacttaatttgagagttagacaaatacagcccactttggatttcatcctagtgaacagactaaaactttgcagtaaaatacctatttctacaaagcaaggtttgcctgcctcggttggggaaacctagtggttttgtcacactagtcgatgtatgatgttagtgttgtaagacaccatggcagaatcttcattattctcacctattctgaaccctgcatcatgtatctgggatgccccctcccaagtccaccaatgtaccacgttgctgacacagccttcatttttaactcaaattgatgctcagtaaaggtcaatgacaatttgttcaaggaagttcatctaaaataatctggaggccttgaaaatgatccctctaaaatgctgttgagcttgtgttcagtgtagcaggaggatctgaacttttcctggagaggaggtgatcgggatgccatttggcagcttaagcacatcctgccagcaggctttaagtggctgttctaggcatagccctccctgaactagaaaggagagtaaccagtttgctatgctgcatctaaccagacacacctgacttagtagtaactctaagaacccttaacttacaaacaactttgtctcctcttagacaatattcattaaatctgaggacacagtttgacagtagttcagattcttgcatgagcaattgacagcatcagagcacacaatatcataagttacataaattacacaaagtacatcataaattacactacagacacgttaggtaaaaagcatcaggcccgggccgggcgtggtggctcatgcctataatcccagcactttgggaggccaagcgggggcggatcacgaggtcaggagattgagaccatcctggctaacacggtgaaaccccatctctactaaaaatacaaaaaattagccgggcgtggtggtgggcgcctgtagtcccagctactcgggaggctgaggcaggagaatggcgtgaacccaggaggtggagcttgcagctagccgagatagcaccactgcactccagcctgggcgacagtgagactccgtttcaaaaaaaaaagcatcaggcccatgaagtatcaaaaaccaggttaggaggtgtgctgtatggcttttatctcaataagtggcagcttactggggaaaaagaaataagaaaaagtgtggccaagcagaagtggatgtttatgatgacggtgggggcccagaggtcataggtgatggtcctactgcccaacagttgccttttgaatccttatgttgatgatggtgtctttctacacactcactgcaactactcaggaattataaagattttctgaaatctgagaagtggaataaggaaacccagtggagctattacacttttaaatgttctagccaaaacaaattgccagtatggttgaggaattgaatatcagatggcatgcagtctcccctcccctcccctatcaaggacagtagaagctgcaaacctcttctcagcctccttcaggcacctcctgttttcataagcaccatgaagaatggtgtttcctaaatgaaaagttcagatactgctggtaaagaaactggaaaaactgaaggaaggaataaaatatgttggtggtattaacacctccagtaagataagtcattggtacggtttttctaagggccgcagtgagatgtagcagaagaaatatgtttattttgggcaaagatttgcttattggcctgggattgcacattttctctatgatgtttgcaacagagaaattttcattttaatgatactcttcctttcttgaaagttacatgtcctcatttctgtttctgcttctcccttggccagtgtcattgatgcagatcattgcatacaacagcacagcaaattgcgccaagtcagtgtgtgaatgggaattagcaatgcacgcttgcaggctctttttccaggaaccaggctgtaacattgaccggggaacctcttcattccctgacatactaaattggtcaattttgtagtactcatctccatccacaaaaacaacaaagataaaatcaatttggagctttatatgacaaaaaggaagaagtccaaaaatatatagccttcccccctcccacatatctgatccaaatattaaatatctgattttataaaacagtttaaattgtctttttaaattgctaacaagcatcagttatatttgagcttcatttttcttttatcctgtctgtcctaataaaaacaaaaatggccaaaaagtggagaggaaagaaaaagcttccactttttaaaatttgttttgtattagttattttacctttagggaccctacaactgaagagagtggagagaataaagaagtgaactttcattcatgtctgctactttgacctcataaagaaatctgcaacacagatgaaaccagtctgtgtggccaagctgatgggatttgaaaagagtggataatttttagcctttccaaaatgcaaataacttggatatatttccattttccagctatagagagaaacaatccagctgcctggaaactgttattagtatagaagtggcttaaagaaaagcatcttcaaatacttgacttagcatatctttcttctttagacttacataatgatattcatctctccattagcaattgaatccaggcataaccgggctcagttacacagcttgtctgtgactgggaagcccattttgtgtcatttctgcacacctgtccgctgttgacaccttattagaggcactgcattttggtttcacaattcttcatctcccttcccaaggaatgggcaatctactgaacttccagatcaatgctttgttggaaagtgatgaatttaagagagttttaacatgtcaaatttgaagccaattcagtatccttatttgttccaagactcttaaccaatactgtgatataaagttaggatttgggaaacgtgtagttaacaacttggaaacatgaagatattaaaatggcagctggctaactgtctcttaagccactatgcaatttctaccaatggagagattagggaagcaaattaagcctcattcagtaggtctgctgtctggtggaacttacggaactcatttcctcctctatccccagcccttctcctaactatggtgataaccagggccatagaagaccttttctctcttacctttctctgataggatcgtgtccttcagtcaagagctcatgtgaactccagactttatattacatctctgaagttcttgatgtggggaagattgacttttattccatttttatatgaaggtgttagatatagccatcaatttatttttctacattccctctacgcttatgtaattttctatttttaaatcttctcttaaatatactgagaatctctagtctccttttctaaaggctgatccaactacacttgtgggctatttttccaagctttgtgtgaaacttgatgacattgggccagcaaaatgcaaagaagactatagtttcaggcagaaaatcacgtccaaagaatttggcatggattaaacaacctctaccacactatagctctcacataggctgaacattttcctaaattctacctgtgcagacactgaggggctctctacctttgaaactatgagaacgtcttaaattaatatgaatatttctctccatgtatagtgtgagctgccaatgcattatcttaatacatcaagaaggaaatcagatttcaggcacacattagcaattgtttgttaatgtccttggcaaacgtgtacctgctttccttcattgttctcttcaggggctttcttccactttcctcttatgaaacgaatgtgtttttgactgttaactgggttcgctttccagatctgtctttcccaaatgaaaggttagtcccatagaccactggctattcagggaaattactctctacctccccatgacatggatgataagtgttgagggatgaacactctggaaactcttagcatggattttgaattccagatttctttataggagatgtataaaaaggagtttatagcatacaaaaattatactgctcttcccagtaagggactaaaaggacatttgaaatctttacattttagatgtttttgtgaattataaatatctcctttttcctcgcttcatgctaacttgtctctagataaaatcttatttcttcatacattggaccacaaggcataaagaaggtagctcagcgccactgagattgtgttctgcataatatttggaaggcttccatttccattgaaaacaaatccatgagtgagagggaaagtctagtatcaattcttctgtttgctcgcaatgacacaaataggttttggggatctacctaagggataggtctactccaaaattattaaatttataattgtgcaattctgtaatttcccaaggcataagtaatatgaccctactgtcagctagatgtcttatcttcaaagagagtatgcattaataaaaagaacttccctttaaagaaccaatctaaaatactaaaaaggcagaaacttttaaaattagaaattggataatttttaagaatctttagagaaaacattggtttatcatagtctttttctttcattgagttttcatttagactagcatggcaagcagggtggccttggactttgatttaggggatcgtgctttggcctggaaaataagcactggcctgcatgcctagaacctgagtgaaggcagtcaacatcctagtatgaatcagacctagcagaaatgtaaattatttcaagtacttcagggtttagttttcttagtgacaccctggaccctggatgctgctttctaaagtgcacctgatccatgcagttttatgtcttcatataactggtatcttgtgagtttgcaagcaatgggatgagcaagaaaaaaaggacgcatggaggagaaaaatttgaacgaggctagtgcaatgttttgctgatagattacattgttagggagctggtgattttttgccatggtcgtatcgtggacagcttttccgtggaaattcaaggcatctgtattaggcaaatgtgagtgcccttgatcttgtattgatcagtgccaatgtactgggaaagcaggtaccccagtgaaactggtctgtgcttggtttaacagctccaacaatttcagatccatggggctgcttgaccatagaccctgtttactccatgcctgttcaaaagtcattttgacttctagctttgtttcactttcttctttcaatacttctgtttcctcgtccttttccttcatattccatggctatttctttcctactttacagtttcccccagacccagattttttcacacctctgcatcatagacaactgagtagctcccttggcccctcctccatcctctcacaccctgtgctccgttcctcagccgtttggacagggagctccgctgtcaccaaggagcccatgtgagacacactgctgtgactgcctcttgttaatgtcagcatcacctcatcacttaagcaaaaaggaaaatccataaaagagatggaaaatacgtctctttttattttattttaagaagattgggcggggtggggggggggttcttattctaggccttctcaatttctcatagattttaccttaaactaattaaggccattctcttgataaatttgtacatcagaccgggtcaccagctatgatgcagaacgccagatttttgaatctcaagtaactttctgtggtgctggacaaattgacttaattctgtgcaggcaaacactttgaatcataaggatttttattgccgctccattcttactactattcatgattcaaacatctacccctgttctgaatcaggatgttgacacttcttggttattttcagatgaacagtaactgctacactcttgaaagcacttaaaagtgcaagcatgtcctaaatagccatttaacctggtaaaacataggcttttctgtttaattaagtattagaccagtctgtagatataatctgaaaagattgtaggcagtaatgaagacagttggggaaaggagaaggccctttaaagacatgaaaccttacacgctcttgggatatttttaagcataataagctcattggattcaggtatttttccctttgcatttttaaaaatacgtatttctaatttgtttgcatatttaattttgtcaaagctgagaaatgctcatgagttgaatttataaatgtcatttgcaaccaaatgaagtatttatttttaaaaagagagtgaaggaaccaacactgatttgtacataataaaaatgtgtgtattatatatatatattttttcctccttgacagtacttggtcacaatatcaagtgtatttttgtacataatatatattgattagaaaaacgtcaattgtctattcaaaaaattctatctctgtgatagattatatttatcctaatctgttgatacctctgttaatttgttttaagagaattatattttttggaatttacagagaattgcattcatggctttcaattgtaaatatgctaagggtattttaataaatcttggtttcatgtccaaaaaaaaaaaaaaaaa

SEQ ID NO: 73 - protein, 1419 aa, Homo sapiens
MEGTHCTLQLHKPITELCYISFCLPKGEVRGFSYKGTVTLDRSNKGFHNCYQVREESDIISLSQEPDEHPGDIFFKQTPTKDILTELYKLTTERERLLTNLLSSDHILGITMGNQEGKLQELSVSLAPEDDCFQSAGDWQGELPVGPLNKRSTHGNKKPRRSSGRRESFGALPQKRTKRKGRGGRESAPLMGKDKICSSHSLPLSRTRPNLWVLEEKGNLLPNGALACSLQRRESCPPDIPKTPDTDLGFGSFETAFKDTGLGREVLPPDCSSTEAGGDGIRRPPSGLEHQQTGLSESHQDPEKHPEAEKDEMEKPAKRTCKQKPVSKVVAKVQDLSSQVQRVVKTHSKGKETIAIRPAAHAEFVPKADLLTLPGAEAGAHGSRRQGKERQGDRSSQSPAGETASISSVSASAEGAVNKVPLKVIESEKLDEAPEGKRLGFPVHTSVPHTRPETRNKRRAGLPLGGHKSLFLDLPHKVGPDSSQPRGDKKKPSPPAPAALGKVFNNSASQSSTHKQTSPVPSPLSPRLPSPQQHHRILRLPALPGEREAALNDSPCRKSRVFSGCVSADTLEPPSSAKVTETKGASPAFLRAGQPRLVPGETLEKSLGPGKTTAEPQHQSPPGISSEGFPWDGFNEQTPKDLPNRDGGAWVLGYRAGPACPFLLHEEREKSNRSELYLDLHPDHSLTEQDDRTPGRLQAVWPPPKTKDTEEKVGLKYTEAEYQAAILHLKREHKEEIENLQAQFELRAFHIRGEHAMITARLEETIENLKHELEHRWRGGCEERKDVCISTDDDCPPKTFRNVCVQTDRETFLKPCESESKTTRSNQLVPKKLNISSLSQLSPPNDHKDIHAALQPMEGMASNQQKALPPPPASIPPPPPLPSGLGSLSPAPPMPPVSAGPPLPPPPPPPPPLPPPSSAGPPPPPPPPPLPNSPAPPNPGGPPPAPPPPGLAPPPPPGLFFGLGSSSSQCPRKPAIEPSCPMKPLYWTRIQISDRSQNATPTLWDSLEEPDIRDPSEFEYLFSKDTTQQKKKPLSETYEKKNKVKKIIKLLDGKRSQTVGILISSLHLEMKDIQQAIFNVDDSVVDLETLAALYENRAQEDELVKIRKYYETSKEEELKLLDKPEQFLHELAQIPNFAERAQCIIFRSVFSEGITSLHRKVEIITRASKDLLHVKSVKDILALILAFGNYMNGGNRTRGQADGYSLEILPKLKDVKSRDNGINLVDYVVKYYLRYYDQEAGTEKSVFPLPEPQDFFLASQVKFEDLIKDLRKLKRQLEASEKQMVVVCKESPKEYLQPFKDKLEEFFQKAKKEHKMEESHLENAQKSFETTVRYFGMKPKSGEKEITPSYVFMVWYEFCSDFKTIWKRESKNISKERLKMAQESVSKLTSEKKVETKKINPTASLKERLRQKEASVTTN

SEQ ID NO: 74 - DNA, 3002 bp, Homo sapiens
attgcgtcccgctctacctctgtggttctttgggagcgacccccgggaagcgtccaaagtggagttcccacacacgctgcgaacccacagccggttttctctgaactcgcgtccctgagtccgggaggtggaggcggagaaaagggtgcggagcgaccccacgcagggccgccccccctcccaccagcgcgtcctgccgcgccggcagccacaggctggcatagcggctgccgacccgccctcgttcctccaccccctgaacgggactgctgggcccgccccgccccgcctgcaggtgaagcggccgcagccgccgagtaggtgcgtggggatgatctcactcgcgcgctccgcgccaggaggaggaggagcgggagcggatccaacttccgggtagtggagccgcaagccaccggcatcttgctttttcttccccctcctcctgtgtgccccgcgccgctccctctttcccttttattcccggccccacccgccaaaatgaacagctcggacgaagagaagcagctgcagctcattaccagtctgaaggagcaagcaataggcgaatatgaagaccttagagcagagaaccagaaaacaaaggagaagtgtgacaaaattaggcaagaacgagatgaagccgttaaaaaactggaagaatttcagaaaatttctcacatggtcatagaggaagttaatttcatgcagaaccatcttgaaatagagaagacttgtcgagaaagtgctgaagctttggcaacaaagctaaataaagaaaataaaacgttgaaaagaatcagcatgttgtacatggccaagctgggaccagatgtaataactgaagagataaacattgatgatgaagattcgactacagacacagacggtgccgccgagacttgtgtctcagtacagtgtcagaagcaaattaaagaacttcgagatcaaattgtatctgttcaggaggaaaagaagattttagccattgagctggaaaatctcaagagcaaactcgtagaagtaattgaagaagtaaataaagttaaacaagaaaagactgttttaaattcagaagttcttgaacagagaaaagtcttagaaaaatgcaatagagtgtccatgttagctgtagaagagtatgaggagatgcaagtaaacctggagctggagaaggaccttcgaaagaaagcagagtcatttgcacaagagatgttcattgagcaaaacaagctaaagagacaaagccaccttctgctgcagagctccatccctgatcagcagcttttgaaagctttagacgaaaatgcaaaactcacccagcaacttgaagaagagagaattcagcatcaacaaaaggtcaaagaattagaagagcaactagaaaatgaaacactccacaaagaaatacacaacctcaaacagcaactggagcttctagaggaagataaaaaggaattggaattgaaatatcagaattctgaagagaaagccagaaatttaaagcactctgttgatgaactccagaaacgagtgaaccagtctgagaattcagtacctccaccacctcctcctccaccaccacttccccctccacctcccaatcctatccgtactcttccaacccaagaggagattgaaaatcttcctgccttccctcgggaaaaactgactctgcgtctcttgctgggaagtggagcctttggagaagtgtatgaaggaacagcagtggacatcttaggagttggaagtggagaaatcaaagtagcagtgaagactttgaagaagggttccacagaccaggagaagattgaattcctgaaggaggcacatctgatgagcaaatttaatcatcccaacattctgaagcagcttggagtttgtctgctgaatgaaccccaatacattatcctggaactgatggagggaggagaccttcttacttatttgcgtaaagcccggatggcaacgttttatggtcctttactcaccttggttgaccttgtagacctgtgtgtagatatttcaaaaggctgtgtctacttggaacggatgcatttcattcacagggatctggcagctagaaattgccttgtttccgtgaaagactataccagtccacggatagtgaagattggagactttggactcgccagagacatctataaaaatgattactatagaaagagaggggaaggcctgctcccagttcggtggatggctccagaaagtttgatggatggaatcttcactactcaatctgatgtatggtcttttggaattctgatttgggagattttaactcttggtcatcagccttatccagctcattccaaccttgatgtgttaaactatgtgcaaacaggagggagactggagccaccaagaaattgtcctgatgatctgtggaatttaatgacccagtgctgggctcaagaacccgaccaaagacctacttttcatagaattcaggaccaacttcagttattcagaaattttttcttaaatagcatttataagtccagagatgaagcaaacaacagtggagtcataaatgaaagctttgaaggtgaagatggcgatgtgatttgtttgaattcagatgacattatgccagttgctttaatggaaacgaagaaccgagaagggttaaactatatggtacttgctacagaatgtggccaaggtgaagaaaagtctgagggtcctctaggctcccaggaatctgaatcttgtggtctgaggaaagaagagaaggaaccacatgcagacaaagatttctgccaagaaaaacaagtggcttactgcccttctggcaagcctgaaggcctgaactatgcctgtctcactcacagtggatatggagatgggtctgattaatagcgttgtttgggaaatagagagttgagataaacactctcattcagtagttactgaaagaaaactctgctagaatgataaatgtcatggtggtctataactccaaataaacaatgcaacgttcc

SEQ ID NO: 75 - protein, 851 aa, Homo sapiens
VRGDDLTRALRARRRRSGSGSNFRVVEPQATGILLFLPPPPVCPAPLPLSLLFPAPPAKMNSSDEEKQLQLITSLKEQAIGEYEDLRAENQKTKEKCDKIRQERDEAVKKLEEFQKISHMVIEEVNFMQNHLEIEKTCRESAEALATKLNKENKTLKRISMLYMAKLGPDVITEEINIDDEDSTTDTDGAAETCVSVQCQKQIKELRDQIVSVQEEKKILAIELENLKSKLVEVIEEVNKVKQEKTVLNSEVLEQRKVLEKCNRVSMLAVEEYEEMQVNLELEKDLRKKAESFAQEMFIEQNKLKRQSHLLLQSSIPDQQLLKALDENAKLTQQLEEERIQHQQKVKELEEQLENETLHKEIHNLKQQLELLEEDKKELELKYQNSEEKARNLKHSVDELQKRVNQSENSVPPPPPPPPPLPPPPPNPIRTLPTQEEIENLPAFPREKLTLRLLLGSGAFGEVYEGTAVDILGVGSGEIKVAVKTLKKGSTDQEKIEFLKEAHLMSKFNHPNILKQLGVCLLNEPQYIILELMEGGDLLTYLRKARMATFYGPLLTLVDLVDLCVDISKGCVYLERMHFIHRDLAARNCLVSVKDYTSPRIVKIGDFGLARDIYKNDYYRKRGEGLLPVRWMAPESLMDGIFTTQSDVWSFGILIWEILTLGHQPYPAHSNLDVLNYVQTGGRLEPPRNCPDDLWNLMTQCWAQEPDQRPTFHRIQDQLQLFRNFFLNSIYKSRDEANNSGVINESFEGEDGDVICLNSDDIMPVALMETKNREGLNYMVLATECGQGEEKSEGPLGSQESESCGLRKEEKEPHADKDFCQEKQVAYCPSGKPEGLNYACLTHSGYGDGSD

SEQ ID NO: 76 - DNA, 5657 bp, Homo sapiens
agaggctagcacggttcctgacaagtctagagcagcactagcgcagagtgagactcatcagctggcaagcaggattctgtgtctctgggttcaggaatcctcaggcagcagaggggacttgctcctcagcccccatcactgcccccacccctacccgtgtaggccaccgagtgaggcccatggactggggagggctgtgcctgacgactcctgtgtccctctatgagggcccagcgccctgaccctcctgcctaggtttctaccttttctctctgtctttggccagctgggggagggggtagaggccgggtgagcaacatggcacagagcaagaggcacgtgtacagccggacgcccagcggcagcaggatgagtgcggaggcaagcgcccggcctctgcgggtgggctcccgtgtagaggtgattggaaaaggccaccgaggcactgtggcctatgttggagccacactgtttgccactggcaaatgggtaggcgtgattctggatgaagcaaagggcaaaaatgatggaactgttcaaggcaggaagtacttcacttgtgatgaagggcatggcatctttgtgcgccagtcccagatccaggtatttgaagatggagcagatactacttccccagagacacctgattcttctgcttcaaaagtcctcaaaagagagggaactgatacaactgcaaagactagcaaactgcggggactgaagcctaagaaggcaccgacagcccgaaagaccacaactcggcgacccaagcccacgcgcccagccagtactggggtggctggggccagtagctccctgggcccctctggctcagcgtcagcaggtgagctgagcagcagtgagcccagcaccccggctcagactccgctggcagcacccatcatccccacgccggtcctcacctctcctggagcagtccccccgcttccttccccatccaaggaggaggagggactaagggctcaggtgcgggacctggaggagaaactagagaccctgagactgaaacgggcagaagacaaagcaaagctaaaagagctggagaaacacaaaatccagctggagcaggtgcaggaatggaagagcaaaatgcaggagcagcaggccgacctgcagcggcgcctcaaggaggcgagaaaggaagccaaggaggcgctggaggcaaaggaacgctatatggaggagatggctgatactgctgatgccattgagatggccactttggacaaggagatggctgaagagcgggctgagtccctgcagcaggaggtggaggcactgaaggagcgggtggacgagctcactactgacttagagatcctcaaggctgagattgaagagaagggctcagatggcgctgcatccagttatcagctcaagcagcttgaggagcagaatgcccgcctgaaggatgccctggtgaggatgcgggatctttcttcctcagagaagcaggagcatgtgaagctccagaagctcatggaaaagaagaaccaagagctggaagttgtgaggcaacagcgggagcgtctgcaggaggagctaagccaggcagagagcaccattgatgagctcaaggagcaggtggatgctgctctgggtgctgaggagatggtggagatgctgacagatcggaacctgaatctggaagagaaagtgcgcgagttgagggagactgtgggagacttggaagcgatgaatgagatgaacgatgagctgcaggagaatgcacgtgagacagaactggagctgcgggagcagctggacatggcaggcgcgcgggttcgtgaggcccagaagcgtgtggaggcagcccaggagacggttgcagactaccagcagaccatcaagaagtaccgccagctgaccgcccatctacaggatgtgaatcgggaactgacaaaccagcaggaagcatctgtggagaggcaacagcagccacctccagagacctttgacttcaaaatcaagtttgctgagactaaggcccatgccaaggcaattgagatggaattgaggcagatggaggtggcccaggccaatcgacacatgtccctgctgacagccttcatgcctgacagcttccttcggccaggtggggaccatgactgcgttctggtgctgttgctcatgcctcgtctcatttgcaaggcagagctgatccggaagcaggcccaggagaagtttgaactaagtgagaactgttcagagcggcctgggctgcgaggagctgctggggagcaactcagctttgctgctggactggtgtactcgctgagcctgctgcaggccacgctacaccgctatgagcatgccctctctcagtgcagtgtggatgtgtataagaaagtgggcagcctgtaccctgagatgagtgcccatgagcgctccttggatttcctcattgaactgctgcacaaggatcagctggatgagactgtcaatgtggagcctctcaccaaggccatcaagtactatcagcatctgtacagcatccaccttgccgaacagcctgaggactgtactatgcagctggctgaccacattaagttcacgcagagtgctctggactgcatgagtgtggaggtaggacggctgcgtgccttcttgcagggtgggcaggaggctacagatattgccctcctgctccgggatctggaaacttcatgcagtgacatccgccagttctgcaagaagatccgaaggcgaatgccagggacagatgctcctgggatcccagctgcactggcctttggaccacaggtatctgacacgctcctagactgcaggaaacacttgacgtgggtcgtggctgtgctgcaggaggtggcagctgctgctgcccagctcattgccccactggcagagaatgaggggctacttgtggctgctctggaggaactggctttcaaagcaagcgagcagatctatgggaccccctccagcagcccctatgagtgtctgcgccagtcatgcaacatcctcatcagtaccatgaacaagctggccacagccatgcaggagggggagtatgatgcagagcggccccccagcaagcctccaccggttgaactgcgggctgctgcccttcgtgcagagatcacagatgctgaaggcctgggtttgaagctcgaagatcgagagacagttattaaggagttgaagaagtcactcaagattaagggagaggagctaagtgaggccaatgtgcggctgagcctcctggagaagaagttggacagtgctgccaaggatgcagatgagcgcatcgagaaagtccagactcggctggaggagacccaggcactgctgcgaaagaaggagaaagagtttgaggagacaatggatgcactccaggctgacatcgaccagctggaggcagagaaggcagaactaaagcagcgtctgaacagccagtccaaacgcacgattgagggactccggggccctcctccttcaggcattgctactctggtctctggcattgctggtgtgtaccgccggaagcaccaggagctgcaagccatgcagatggagctgcagagccctgagtacaagctgagcaagctccgcacctcgaccatcatgaccgactacaaccccaactactgctttgctggcaagacctcctccatcagtgacctgaaggaggtgccgcggaaaaacatcaccctcattcggggtctgggccatggcgcctttggggaggtgtatgaaggccaggtgtccggaatgcccaacgacccaagccccctgcaagtggctgtgaagacgctgcctgaagtgtgctctgaacaggacgaactggatttcctcatggaagccctgatcatcagcaaattcaaccaccagaacattgttcgctgcattggggtgagcctgcaatccctgccccggttcatcctgctggagctcatggcggggggagacctcaagtccttcctccgagagacccgccctcgcccgagccagccctcctccctggccatgctggaccttctgcacgtggctcgggacattgcctgtggctgtcagtatttggaggaaaaccacttcatccaccgagacattgctgccagaaactgcctcttgacctgtccaggccctggaagagtggccaagattggagacttcgggatggcccgagacatctacagggcgagctactatagaaagggaggctgtgccatgctgccagttaagtggatgcccccagaggccttcatggaaggaatattcacttctaaaacagacacatggtcctttggagtgctgctatgggaaatcttttctcttggatatatgccataccccagcaaaagcaaccaggaagttctggagtttgtcaccagtggaggccggatggacccacccaagaactgccctgggcctgtataccggataatgactcagtgctggcaacatcagcctgaagacaggcccaactttgccatcattttggagaggattgaatactgcacccaggacccggatgtaatcaacaccgctttgccgatagaatatggtccacttgtggaagaggaagagaaagtgcctgtgaggcccaaggaccctgagggggttcctcctctcctggtctctcaacaggcaaaacgggaggaggagcgcagcccagctgccccaccacctctgcctaccacctcctctggcaaggctgcaaagaaacccacagctgcagagatctctgttcgagtccctagagggccggccgtggaagggggacacgtgaatatggcattctctcagtccaaccctccttcggagttgcacaaggtccacggatccagaaacaagcccaccagcttgtggaacccaacgtacggctcctggtttacagagaaacccaccaaaaagaataatcctatagcaaagaaggagccacacgacaggggtaacctggggctggagggaagctgtactgtcccacctaacgttgcaactgggagacttccgggggcctcactgctcctagagccctcttcgctgactgccaatatgaaggaggtacctctgttcaggctacgtcacttcccttgtgggaatgtcaattacggctaccagcaacagggcttgcccttagaagccgctactgcccctggagctggtcattacgaggataccattctgaaaagcaagaatagcatgaaccagcctgggccctgagctcggtcgcacactcacttctcttccttgggatccctaagaccgtggaggagagagaggcaatggctccttcacaaaccagagaccaaatgtcacgttttgttttgtgccaacctattttgaagtaccaccaaaaaagctgtattttgaaaatgctttagaaaggttttgagcatgggttcatcctattctttcgaaagaagaaaatatcataaaaatgagtgataaatacaaggcccagatgtggttgcataaggtttttatgcatgtttgttgtatacttccttatgcttctttcaaattgtgtgtgctctgcttcaatgtagtcagaattagctgcttctatgtttcatagttggggtcatagatgtttccttgccttgttgatgtggacatgagccatttgaggggagagggaacggaaataaaggagttatttgtaatgactaaaa

SEQ ID NO: 77 - protein, 1721 aa, Homo sapiens
VSTFSLCLWPAGGGGRGRVSNMAQSKRHVYSRTPSGSRMSAEASARPLRVGSRVEVIGKGHRGTVAYVGATLFATGKWVGVILDEAKGKNDGTVQGRKYFTCDEGHGIFVRQSQIQVFEDGADTTSPETPDSSASKVLKREGTDTTAKTSKLRGLKPKKAPTARKTTTRRPKPTRPASTGVAGASSSLGPSGSASAGELSSSEPSTPAQTPLAAPIIPTPVLTSPGAVPPLPSPSKEEEGLRAQVRDLEEKLETLRLKRAEDKAKLKELEKHKIQLEQVQEWKSKMQEQQADLQRRLKEARKEAKEALEAKERYMEEMADTADAIEMATLDKEMAEERAESLQQEVEALKERVDELTTDLEILKAEIEEKGSDGAASSYQLKQLEEQNARLKDALVRMRDLSSSEKQEHVKLQKLMEKKNQELEVVRQQRERLQEELSQAESTIDELKEQVDAALGAEEMVEMLTDRNLNLEEKVRELRETVGDLEAMNEMNDELQENARETELELREQLDMAGARVREAQKRVEAAQETVADYQQTIKKYRQLTAHLQDVNRELTNQQEASVERQQQPPPETFDFKIKFAETKAHAKAIEMELRQMEVAQANRHMSLLTAFMPDSFLRPGGDHDCVLVLLLMPRLICKAELIRKQAQEKFELSENCSERPGLRGAAGEQLSFAAGLVYSLSLLQATLHRYEHALSQCSVDVYKKVGSLYPEMSAHERSLDFLIELLHKDQLDETVNVEPLTKAIKYYQHLYSIHLAEQPEDCTMQLADHIKFTQSALDCMSVEVGRLRAFLQGGQEATDIALLLRDLETSCSDIRQFCKKIRRRMPGTDAPGIPAALAFGPQVSDTLLDCRKHLTWVVAVLQEVAAAAAQLIAPLAENEGLLVAALEELAFKASEQIYGTPSSSPYECLRQSCNILISTMNKLATAMQEGEYDAERPPSKPPPVELRAAALRAEITDAEGLGLKLEDRETVIKELKKSLKIKGEELSEANVRLSLLEKKLDSAAKDADERIEKVQTRLEETQALLRKKEKEFEETMDALQADIDQLEAEKAELKQRLNSQSKRTIEGLRGPPPSGIATLVSGIAGVYRRKHQELQAMQMELQSPEYKLSKLRTSTIMTDYNPNYCFAGKTSSISDLKEVPRKNITLIRGLGHGAFGEVYEGQVSGMPNDPSPLQVAVKTLPEVCSEQDELDFLMEALIISKFNHQNIVRCIGVSLQSLPRFILLELMAGGDLKSFLRETRPRPSQPSSLAMLDLLHVARDIACGCQYLEENHFIHRDIAARNCLLTCPGPGRVAKIGDFGMARDIYRASYYRKGGCAMLPVKWMPPEAFMEGIFTSKTDTWSFGVLLWEIFSLGYMPYPSKSNQEVLEFVTSGGRMDPPKNCPGPVYRIMTQCWQHQPEDRPNFAIILERIEYCTQDPDVINTALPIEYGPLVEEEEKVPVRPKDPEGVPPLLVSQQAKREEERSPAAPPPLPTTSSGKAAKKPTAAEISVRVPRGPAVEGGHVNMAFSQSNPPSELHKVHGSRNKPTSLWNPTYGSWFTEKPTKKNNPIAKKEPHDRGNLGLEGSCTVPPNVATGRLPGASLLLEPSSLTANMKEVPLFRLRHFPCGNVNYGYQQQGLPLEAATAPGAGHYEDTILKSKNSMNQPGPARSHTHFSSLGSLRPWRRERQWLLHKPETKCHVLFCANLFSTTKKAVFKCFRKVLSMGSSYSFERRKYHKNE

SEQ ID NO: 78 - DNA, 3312 bp, Homo sapiens
gccgccgccgccgccgccgccgcgccgcggcttgagggcgggaggctgggggagggtagcggagccggcgccgccgccatgttgggtctgaagcggctgctgtaggcgccgacggagcgagcgggcgtgcggagcgggcgacagtggcgtgggatctgcctctctgcgagcagctgggagcggcggcggcggcgccatgagcgggggcaccccttacatcggcagcaagatcagcctcatctccaaggcggagatccgctacgagggcatcctctacaccatcgacaccgaaaactccaccgtagcccttgccaaagttcgatcctttggtacagaagacagaccgacagatcgtccaataccacctcgagatgaagtctttgaatacattatattccgtgggagtgacattaaagaccttactgtttgtgagccaccaaaaccacagtgttctttgcctcaagacccagctattgttcagtcctcactaggctcatcgacttcttcattccagtccatgggttcttatggacctttcggcaggatgcccacatacagtcagttcagtccgagttccttagttgggcagcagtttggtgctgttggtgttgctggaagctctttgacatcctttggaacagaaacatcaaacagtggtaccttaccccaaagtagtgcggttggttctgcctttacacaggatacaagatctctaaaaacacagttatctcaaggtcgctcaagccctcagttagaccctttgagaaaaagcccaaccatggaacaagcagtgcagaccgcctcagcccacttacctgctccagcagctgttgggagaaggagtcctgtatcaaccaggcctttgccatctgccagccaaaaggcaggagagaatcaggagcacaggcgagctgaagtacacaaagtttcaaggccagaaaatgagcaactcagaaatgataacaagagacaagtagctccaggtgctccttcagctccaaggagagggcgtgggggtcatcggggtggcaggggaagatttggtattcggcgagatgggccaatgaaatttgagaaagactttgactttgaaagtgcaaatgcacaattcaacaaggaagagattgacagagagtttcataataaacttaaattaaaagaagataaacttgagaaacaggagaagcctgtaaatggtgaagataaaggagactcaggagttgatacccaaaacagtgaaggaaatgccgatgaagaagatccacttggacctaattgctattatgacaaaactaaatccttctttgataatatttcttgtgatgacaatagagaacggagaccaacctgggctgaagaaagaagattaaatgctgaaacatttggaatcccacttcgtccaaaccgtggccgtgggggatacagaggcagaggaggtcttggtttccgtggtggcagagggcgtggtggtggcagaggtggtaccttcactgcccctcgaggatttcgcggtggattcagaggaggtcgtgggggccgggagtttgcggattttgaatatagggacttgattagagaccaaggatttcgtggtgatggaggatcaaccacaggtttgtctgctaccccccctgcctcattacctggctcactaactaacgtgaaagccttacagaaatctccaggacctcagcgagaaaggaagtcatcttcatcctcagaagacaggaatcgaatgaaaacacttggtagacgggactcgagtgatgattgggagattcctgatgggcagattacagtgggacaaagaattggatctggatcatttggaacagtctacaagggaaagtggcatggtgatgtggcagtgaaaatgttgaatgtgacagcacctacacctcagcagttacaagccttcaaaaatgaagtaggagtactcaggaaaacacgacatgtgaatatcctactcttcatgggctattccacaaagccacaactggctattgttacccagtggtgtgagggctccagcttgtatcaccatctccatatcattgagaccaaatttgagatgatcaaacttatagatattgcacgacagactgcacagggcatggattacttacacgccaagtcaatcatccacagagacctcaagagtaataatatatttcttcatgaagacctcacagtaaaaataggtgattttggtctagctacagtgaaatctcgatggagtgggtcccatcagtttgaacagttgtctggatccattttgtggatggcaccagaagtcatcagaatgcaagataaaaatccatacagctttcagtcagatgtatatgcatttggaattgttctgtatgaattgatgactggacagttaccttattcaaacatcaacaacagggaccagataatttttatggtgggacgaggatacctgtctccagatctcagtaaggtacggagtaactgtccaaaagccatgaagagattaatggcagagtgcctcaaaaagaaaagagatgagagaccactctttccccaaattctcgcctctattgagctgctggcccgctcattgccaaaaattcaccgcagtgcatcagaaccctccttgaatcgggctggtttccaaacagaggattttagtctatatgcttgtgcttctccaaaaacacccatccaggcagggggatatggtgcgtttcctgtccactgaaacaaatgagtgagagagttcaggagagtagcaacaaaaggaaaataaatgaacatatgtttgcttatatgttaaattgaataaaatactctctttttttttaaggtgaaccaaagaacacttgtgtggttaaagactagatataatttttccccaaactaaaatttatacttaacattggatttttaacatccaagggttaaaatacatagacattgctaaaaattggcagagcctcttctagaggctttactttctgttccgggtttgtatcattcacttggttattttaagtagtaaacttcagtttctcatgcaacttttgttgccagctatcacatgtccactagggactccagaagaagaccctacctatgcctgtgtttgcaggtgagaagttggcagtcggttagcctgggttagataaggcaaactgaacagatctaatttaggaagtcagtagaatttaataattctattattattcttaataatttttctataactatttctttttataacaatttggaaaatgtggatgtcttttatttccttgaagcaataaactaagtttctttttataaaaa

SEQ ID NO: 79 - protein, 877 aa, Homo sapiens
SGCCRRRRSERACGAGDSGVGSASLRAAGSGGGGAMSGGTPYIGSKISLISKAEIRYEGILYTIDTENSTVALAKVRSFGTEDRPTDRPIPPRDEVFEYIIFRGSDIKDLTVCEPPKPQCSLPQDPAIVQSSLGSSTSSFQSMGSYGPFGRMPTYSQFSPSSLVGQQFGAVGVAGSSLTSFGTETSNSGTLPQSSAVGSAFTQDTRSLKTQLSQGRSSPQLDPLRKSPTMEQAVQTASAHLPAPAAVGRRSPVSTRPLPSASQKAGENQEHRRAEVHKVSRPENEQLRNDNKRQVAPGAPSAPRRGRGGHRGGRGRFGIRRDGPMKFEKDFDFESANAQFNKEEIDREFHNKLKLKEDKLEKQEKPVNGEDKGDSGVDTQNSEGNADEEDPLGPNCYYDKTKSFFDNISCDDNRERRPTWAEERRLNAETFGIPLRPNRGRGGYRGRGGLGFRGGRGRGGGRGGTFTAPRGFRGGFRGGRGGREFADFEYRDLIRDQGFRGDGGSTTGLSATPPASLPGSLTNVKALQKSPGPQRERKSSSSSEDRNRMKTLGRRDSSDDWEIPDGQITVGQRIGSGSFGTVYKGKWHGDVAVKMLNVTAPTPQQLQAFKNEVGVLRKTRHVNILLFMGYSTKPQLAIVTQWCEGSSLYHHLHIIETKFEMIKLIDIARQTAQGMDYLHAKSIIHRDLKSNNIFLHEDLTVKIGDFGLATVKSRWSGSHQFEQLSGSILWMAPEVIRMQDKNPYSFQSDVYAFGIVLYELMTGQLPYSNINNRDQIIFMVGRGYLSPDLSKVRSNCPKAMKRLMAECLKKKRDERPLFPQILASIELLARSLPKIHRSASEPSLNRAGFQTEDFSLYACASPKTPIQAGGYGAFPVH

SEQ ID NO: 80 - DNA, 2174 bp, Homo sapiens
aggaggacctattagagcctttgccccggcgtcggtgactcagtgttcgcgggagcgccgcacctacaccagccaacccagatcccgaggtccgacagcgcccggcccagatccccacgcctgccaggagcaagccgagagccagccggccggcgcactccgactccgagcagtctctgtccttcgacccgagccccgcgccctttccgggacccctgccccgcgggcagcgctgccaacctgccggccatggagaccccgtcccagcggcgcgccacccgcagcggggcgcaggccagctccactccgctgtcgcccacccgcatcacccggctgcaggagaaggaggacctgcaggagctcaatgatcgcttggcggtctacatcgaccgtgtgcgctcgctggaaacggagaacgcagggctgcgccttcgcatcaccgagtctgaagaggtggtcagccgcgaggtgtccggcatcaaggccgcctacgaggccgagctcggggatgcccgcaagacccttgactcagtagccaaggagcgcgcccgcctgcagctggagctgagcaaagtgcgtgaggagtttaaggagctgaaagcgcgcaataccaagaaggagggtgacctgatagctgctcaggctcggctgaaggacctggaggctctgctgaactccaaggaggccgcactgagcactgctctcagtgagaagcgcacgctggagggcgagctgcatgatctgcggggccaggtggccaagacactaacagcacatctggagacccggtggagaagaaggacgaaacaccttttggggtctcggtggctgtgggcctggccgtctttgcctgcctcttcctttctacgctgctccttgtgctcaacaaatgtggacggagaaacaagtttgggatcaaccgcccggctgtgctggctccagaggatgggctggccatgtccctgcatttcatgacattgggtggcagctccctgtcccccaccgagggcaaaggctctgggctccaaggccacatcatcgagaacccacaatacttcagtgatgcctgtgttcaccacatcaagcgccgggacatcgtgctcaagtgggagctgggggagggcgcctttgggaaggtcttccttgctgagtgccacaacctcctgcctgagcaggacaagatgctggtggctgtcaaggcactgaaggaggcgtccgagagtgctcggcaggacttccagcgtgaggctgagctgctcaccatgctgcagcaccagcacatcgtgcgcttcttcggcgtctgcaccgagggccgccccctgctcatggtctttgagtatatgcggcacggggacctcaaccgcttcctccgatcccatggacctgatgccaagctgctggctggtggggaggatgtggctccaggccccctgggtctggggcagctgctggccgtggctagccaggtcgctgcggggatggtgtacctggcgggtctgcattttgtgcaccgggacctggccacacgcaactgtctagtgggccagggactggtggtcaagattggtgattttggcatgagcagggatatctacagcaccgactattaccgtgtgggaggccgcaccatgctgcccattcgctggatgccgcccgagagcatcctgtaccgtaagttcaccaccgagagcgacgtgtggagcttcggcgtggtgctctgggagatcttcacctacggcaagcagccctggtaccagctctccaacacggaggcaatcgactgcatcacgcagggacgtgagttggagcggccacgtgcctgcccaccagaggtctacgccatcatgcggggctgctggcagcgggagccccagcaacgccacagcatcaaggatgtgcacgcccggctgcaagccctggcccaggcacctcctgtctacctggatgtcctgggctagggggccggcccaggggctgggagtggttagccggaatactggggcctgccctcagcatcccccatagctcccagcagccccagggtgatctcaaagtatctaattcaccctcagcatgtgggaagggacaggtgggggctgggagtagaggatgttcctgcttctctaggcaaggtcccgtcatagcaattatatttattatcccttgaaaaaaaa

SEQ ID NO: 81 - protein, 319 aa, Homo sapiens
SLCPGVGDSVFAGAPHLHQPTQIPRSDSARPRSPRLPGASREPAGRRTPTPSSLCPSTRAPRPFRDPCPAGSAANLPAMETPSQRRATRSGAQASSTPLSPTRITRLQEKEDLQELNDRLAVYIDRVRSLETENAGLRLRITESEEVVSREVSGIKAAYEAELGDARKTLDSVAKERARLQLELSKVREEFKELKARNTKKEGDLIAAQARLKDLEALLNSKEAALSTALSEKRTLEGELHDLRGQVAKTLTAHLETRWRRRTKHLLGSRWLWAWPSLPASSFLRCSLCSTNVDGETSLGSTARLCWLQRMGWPCPCIS

SEQ ID NO: 82 - DNA, 2789 bp, Homo sapiens
gagaagccaatcagtgtcgtcgcggtcgctgttctaaagcccgcacgcacccaccgggactcagattctccccagacgccgaggatggccgtcatggcgccccgaaccctcctcctgctactctcgggggccctggccctgacccagacctgggcgggctcccactccatgaggtatttcttcacatccgtgtcccggcccggccgcggggagccccgcttcatcgccgtgggctacgtggacgacacgcagttcgtgcggttcgacagcgacgccgcgagccagaggatggagccgcgggcgccgtggatagagcaggaggggccggagtattgggaccaggagacacggaatgtgaaggcccagtcacagactgaccgagtggacctggggaccctgcgcggctactacaaccagagcgaggccggttctcacaccatccagataatgtatggctgcgacgtggggtcggacgggcgcttcctccgcgggtaccggcaggacgcctacgacggcaaggattacatcgccctgaacgaggacctgcgctcttggaccgcggcggacatggcggctcagatcaccaagcgcaagtgggaggcggcccatgaggcggagcagttgagagcctacctggatggcacgtgcgtggagtggctccgcagatacctggagaacgggaaggagacgctgcagcgcacggacccccccaagacacatatgacccaccaccccatctctgaccatgaggccaccctgaggtgctgggccctgggcttctaccctgcggagatcacactgacctggcagcgggatggggaggaccagacccaggacacggagctcgtggagaccaggcctgcaggggatggaaccttccagaagtgggcggctgtggtggtgccttctggagaggagcagagatacacctgccatgtgcagcatgagggtctgcccaagcccctcaccctgagatgggagctgtcttcccagcccaccatccccatcgtgggcatcattgctggcctggttctccttggagctgtgatcactggagctgtggtcgctgccgtgatgtggaggaggaagagctcagatagaaaaggagggagttacactcaggctgcaagcagtgacagtgcccagggctctgatgtgtccctcacagcttgtaaagatgatttttggataccagaaacaagtttcatacttactattatagttggaatatttctggttgttacaatcccactgacctttgtctggcatagaagattaaagaatcaaaaaagtgccaaggaaggggtgacagtgcttataaacgaagacaaagagttggctgagctgcgaggtctggcagccggagtaggcctggctaatgcctgctatgcaatacatactcttccaacccaagaggagattgaaaatcttcctgccttccctcgggaaaaactgactctgcgtctcttgctgggaagtggagcctttggagaagtgtatgaaggaacagcagtggacatcttaggagttggaagtggagaaatcaaagtagcagtgaagactttgaagaagggttccacagaccaggagaagattgaattcctgaaggaggcacatctgatgagcaaatttaatcatcccaacattctgaagcagcttggagtttgtctgctgaatgaaccccaatacattatcctggaactgatggagggaggagaccttcttacttatttgcgtaaagcccggatggcaacgttttatggtcctttactcaccttggttgaccttgtagacctgtgtgtagatatttcaaaaggctgtgtctacttggaacggatgcatttcattcacagggatctggcagctagaaattgccttgtttccgtgaaagactataccagtccacggatagtgaagattggagactttggactcgccagagacatctataaaaatgattactatagaaagagaggggaaggcctgctcccagttcggtggatggctccagaaagtttgatggatggaatcttcactactcaatctgatgtatggtcttttggaattctgatttgggagattttaactcttggtcatcagccttatccagctcattccaaccttgatgtgttaaactatgtgcaaacaggagggagactggagccaccaagaaattgtcctgatgatctgtggaatttaatgacccagtgctgggctcaagaacccgaccaaagacctacttttcatagaattcaggaccaacttcagttattcagaaattttttcttaaatagcatttataagtccagagatgaagcaaacaacagtggagtcataaatgaaagctttgaaggtgaagatggcgatgtgatttgtttgaattcagatgacattatgccagttgctttaatggaaacgaagaaccgagaagggttaaactatatggtacttgctacagaatgtggccaaggtgaagaaaagtctgagggtcctctaggctcccaggaatctgaatcttgtggtctgaggaaagaagagaaggaaccacatgcagacaaagatttctgccaagaaaaacaagtggcttactgcccttctggcaagcctgaaggcctgaactatgcctgtctcactcacagtggatatggagatgggtctgattaatagcgttgtttgggaaatagagagttgagataaacactctcattcagtagttactgaaagaaaactctgctagaatgataaatgtcatggtggtctataactccaaataaacaatgcaacgttcc

SEQ ID NO: 83 - protein, 859 aa, Homo sapiens
MAVMAPRTLLLLLSGALALTQTWAGSHSMRYFFTSVSRPGRGEPRFIAVGYVDDTQFVRFDSDAASQRMEPRAPWIEQEGPEYWDQETRNVKAQSQTDRVDLGTLRGYYNQSEAGSHTIQIMYGCDVGSDGRFLRGYRQDAYDGKDYIALNEDLRSWTAADMAAQITKRKWEAAHEAEQLRAYLDGTCVEWLRRYLENGKETLQRTDPPKTHMTHHPISDHEATLRCWALGFYPAEITLTWQRDGEDQTQDTELVETRPAGDGTFQKWAAVVVPSGEEQRYTCHVQHEGLPKPLTLRWELSSQPTIPIVGIIAGLVLLGAVITGAVVAAVMWRRKSSDRKGGSYTQAASSDSAQGSDVSLTACKDDFWIPETSFILTIIVGIFLVVTIPLTFVWHRRLKNQKSAKEGVTVLINEDKELAELRGLAAGVGLANACYAIHTLPTQEEIENLPAFPREKLTLRLLLGSGAFGEVYEGTAVDILGVGSGEIKVAVKTLKKGSTDQEKIEFLKEAHLMSKFNHPNILKQLGVCLLNEPQYIILELMEGGDLLTYLRKARMATFYGPLLTLVDLVDLCVDISKGCVYLERMHFIHRDLAARNCLVSVKDYTSPRIVKIGDFGLARDIYKNDYYRKRGEGLLPVRWMAPESLMDGIFTTQSDVWSFGILIWEILTLGHQPYPAHSNLDVLNYVQTGGRLEPPRNCPDDLWNLMTQCWAQEPDQRPTFHRIQDQLQLFRNFFLNSIYKSRDEANNSGVINESFEGEDGDVICLNSDDIMPVALMETKNREGLNYMVLATECGQGEEKSEGPLGSQESESCGLRKEEKEPHADKDFCQEKQVAYCPSGKPEGLNYACLTHSGYGDGSD

SEQ ID NO: 84 - DNA, 4932 bp, Homo sapiens
accccgggcaggtggagcgctcgcggctgctcgcggcgagcccgggagtgatggcgaggcccctgcgggcggccagcgcctgaggcgccccgccccgccccgccccgcgcggccctccccgcccggccctgccctgccctgctccctgccggcggctgcgggcgcttcctagtccgctcgggcggccgcccaggcgaggtgcggcctccgcacaggcggggggcgtaggcgcgcggggcccgccatggctgcgtcggagctctacacaaagtttgccagggtttggatacctgatccagaggaagtctggaagtcagcagagctgctcaaagattataagccaggagataaagtcctcctgcttcacctcgaggaaggaaaggatttggaataccatctagatccaaagaccaaggagctgcctcacttacgaaatcctgacatacttgttggtgaaaatgacctcacagccctcagctatcttcatgagcctgctgtgctccataatctcagagtccgctttattgattccaaacttatttatacgtattgtggtatagtcctagtagctataaatccctatgaacagctgcctatttatggagaagatattattaatgcatacagtggtcagaacatgggtgatatggatccacatatctttgcagtagctgaagaagcttacaagcaaatggccagagatgaacgaaatcagtccatcatcgtaagtggagagtctggggcaggaaaaacagtctcagctaagtatgccatgcgatactttgcaactgtgagtggttctgccagtgaggccaatgtggaggaaaaggtcttggcctccaaccccatcatggagtccattggaaatgctaaaacaaccaggaatgataatagcagccgttttgggaagtatattgagattggttttgataagagatatcgaatcattggtgccaatatgagaacttatcttttagagaaatccagagtggtattccaggcagaagaggagagaaactatcatatcttctatcagctttgtgcctcagcaaagttacctgaatttaaaatgctacgattaggaaatgcagataactttaattacacaaaacaaggaggcagtcctgtgattgaaggagtggatgatgcaaaggagatggcacatactaggcaggcctgcactttgctaggaattagtgaatctcatcaaatgggaattttccgaatacttgctggcatccttcacttaggcaatgttggatttacatcccgagatgcagacagctgcacaatacctcccaagcatgaacctctctgcatcttctgtgacctcatgggtgtggactatgaggagatgtgtcactggctctgccatcggaaactggctactgccacagagacatacatcaagcccatctccaagctgcaggccacgaatgcccgcgatgctttggccaagcacatctatgccaagctctttaactggattgtagataatgtcaatcaggctctccattctgctgtcaaacagcactcttttattggtgtgctagacatttacggatttgaaacatttgagataaatagttttgaacagttttgcataaattatgcaaatgaaaaactacagcaacaattcaatatgcatgtcttcaaattggagcaagaagaatatatgaaggaacaaattccatggacactcatagatttttatgataatcagccttgtattaatcttatagaatcaaaactaggcattctagatttactggatgaggaatgcaagatgcctaaaggcacagatgacacctgggcccaaaaattgtacaacacacatttgaacaaatgtgcactctttgaaaagcctcgtctatcaaacaaagctttcatcatccaacattttgctgacaaagtggaataccagtgtgaaggatttctcgaaaagaataaagacaccgtttttgaagaacaaattaaagttcttaaatcaagcaagtttaagatgctaccagaactatttcaagatgatgagaaggccatcagtccaacttcagccacctcctcagggcgcacacccctcacacgaactcctgcaaagcccaccaaaggcagaccaggccaaatggccaaagagcacaagaaaacagtggggcatcagttcagaaactccctgcacctgcttatggagacactcaatgccactacccctcactatgtgcgctgtatcaagcctaatgacttcaagttcccattcacgtttgatgagaagagggcagtgcagcagctgagagcatgtggtgtcctggaaaccatccgaatcagtgcggccggtttcccctcacggtggacttaccaagaatttttcagccgctaccgtgtcctaatgaagcagaaagatgtgctgagtgacagaaagcaaacatgcaagaatgtgttagagaaactgatactggacaaggacaaataccagtttggtaagacaaagatctttttccgtgccggtcaagtggcctatctagaaaaattgagagctgacaaactgagagctgcctgcatccggatccagaagaccatccgagggtggctgctgagaaagaagtacctacgcatgcggaaggcagccatcaccatgcagagatacgtgcggggctaccaggcccgatgctatgctaagtttctgcgcagaaccaaggcagcaaccatcattcaaaagtactggcgcatgtatgtggtccgcaggaggtacaagattagacgagctgccactattgttcttcagtcttacttgcgaggcttcttggccagaaataggtatcgcaagatactccgtgagcacaaagcagtcatcattcagaagcgagtccggggctggctggcccgcacacactacaagaggagcatgcatgccatcatctaccttcagtgctgcttcaggcggatgatggccaagcgtgagctaaagaagctcaaaatcgaggctcgctcagtggagcgctataagaagctgcacatcggcatggagaacaagatcatgcagctgcagcgcaaagttgatgagcagaacaaagactacaaatgccttgtggagaaactaaccaatctggaaggaatatacaactctgagactgagaaactacgaagtgacttagaacgtcttcaactaagtgaagaggaagcgaaagttgccactgggcgggtccttagtctgcaggaagaaattgccaagctccggaaagacctggagcaaactcgttcagagaaaaaatgcattgaggaacatgcagatcgatacaaacaagaaacagagcagctggtatcaaatctgaaggaagaaaatactttgctgaagcaagaaaaagaagccctcaatcaccgcatcgtgcagcaggctaaggagatgacagtctggcatagaagattaaagaatcaaaaaagtgccaaggaaggggtgacagtgcttataaacgaagacaaagagttggctgagctgcgaggtctggcagccggagtaggcctggctaatgcctgctatgcaatacatactcttccaacccaagaggagattgaaaatcttcctgccttccctcgggaaaaactgactctgcgtctcttgctgggaagtggagcctttggagaagtgtatgaaggaacagcagtggacatcttaggagttggaagtggagaaatcaaagtagcagtgaagactttgaagaagggttccacagaccaggagaagattgaattcctgaaggaggcacatctgatgagcaaatttaatcatcccaacattctgaagcagcttggagtttgtctgctgaatgaaccccaatacattatcctggaactgatggagggaggagaccttcttacttatttgcgtaaagcccggatggcaacgttttatggtcctttactcaccttggttgaccttgtagacctgtgtgtagatatttcaaaaggctgtgtctacttggaacggatgcatttcattcacagggatctggcagctagaaattgccttgtttccgtgaaagactataccagtccacggatagtgaagattggagactttggactcgccagagacatctataaaaatgattactatagaaagagaggggaaggcctgctcccagttcggtggatggctccagaaagtttgatggatggaatcttcactactcaatctgatgtatggtcttttggaattctgatttgggagattttaactcttggtcatcagccttatccagctcattccaaccttgatgtgttaaactatgtgcaaacaggagggagactggagccaccaagaaattgtcctgatgatctgtggaatttaatgacccagtgctgggctcaagaacccgaccaaagacctacttttcatagaattcaggaccaacttcagttattcagaaattttttcttaaatagcatttataagtccagagatgaagcaaacaacagtggagtcataaatgaaagctttgaaggtgaagatggcgatgtgatttgtttgaattcagatgacattatgccagttgctttaatggaaacgaagaaccgagaagggttaaactatatggtacttgctacagaatgtggccaaggtgaagaaaagtctgagggtcctctaggctcccaggaatctgaatcttgtggtctgaggaaagaagagaaggaaccacatgcagacaaagatttctgccaagaaaaacaagtggcttactgcccttctggcaagcctgaaggcctgaactatgcctgtctcactcacagtggatatggagatgggtctgattaatagcgttgtttgggaaatagagagttgagataaacactctcattcagtagttactgaaagaaaactctgctagaatgataaatgtcatggtggtctataactccaaataaacaatgcaacgttcc

SEQ ID NO: 85 - protein, 1520 aa, Homo sapiens; identical to SEQ ID NO: 28

SEQ ID NO: 86 - DNA, 2716 bp, Homo sapiens
gattcctgcagggagggaggagagaagggcggcagtgggagggggaggtacctggaactgggagtgatgtcagctcccagctcggtgcctgcccggattcctgacatggtgtagtgcaggcagggtggggaaaggacggggaaggactcgtgtgctgcgagctggcggccgggccggagtgctggggctttgaactccgagaggaggtggaccagaacttttggaactagtgccggcggctctccaccccccagtataaaagaacgtgtggatcactttgctgagtacatccaagatttgaagaactgaaataaatcagctttaaacctgctttttaaaaatatctgggttggaatttgcccctgacaaataataaaatgatgagtgatgcaagtgacatgttggctgcagcgttggagcagatggatggtatcatagcaggttctaaggctctggaatattccaatgggatttttgattgccaatctcccacctctccattcatgggaagtttgcgagctctgcaccttgtggaagacctgcgtggattgttagagatgatggaaacagatgagaaagaaggcttgagatgccagatcccagattcaacagcagaaacgcttgttgaatggcttcagagtcaaatgacaaatggacacctaccagggaacggagatgtgtatcaagaaaggctggcacgtttagaaaatgataaagaatccctcgttcttcaggtaagtgtgttaacagaccaggtggaggctcagggagagaagattcgagatttggagttttgtcttgaagagcacagagagaagttgaatgccacagaagaaatgctgcagcaggagcttctaagtaggacatccttagaaactcagaagttggatctgatggctgaaatatctaacttgaagttgaaactgacagctgtagagaaggacagattggattatgaagataagttcagagacacagaggggctgattcaggagatcaatgatttgaggttaaaagttagtgaaatggacagtgagagacttcagtatgaaaaaaagcttaaatcaaccaaagatgaactggcatctttaaaagaacaactagaagaaaaggaatctgaagtaaaaaggctacaagaaaaattggtttgcaagatgaaaggagaaggggttgaaattgttgatagagtctggcatagaagattaaagaatcaaaaaagtgccaaggaaggggtgacagtgcttataaacgaagacaaagagttggctgagctgcgaggtctggcagccggagtaggcctggctaatgcctgctatgcaatacatactcttccaacccaagaggagattgaaaatcttcctgccttccctcgggaaaaactgactctgcgtctcttgctgggaagtggagcctttggagaagtgtatgaaggaacagcagtggacatcttaggagttggaagtggagaaatcaaagtagcagtgaagactttgaagaagggttccacagaccaggagaagattgaattcctgaaggaggcacatctgatgagcaaatttaatcatcccaacattctgaagcagcttggagtttgtctgctgaatgaaccccaatacattatcctggaactgatggagggaggagaccttcttacttatttgcgtaaagcccggatggcaacgttttatggtcctttactcaccttggttgaccttgtagacctgtgtgtagatatttcaaaaggctgtgtctacttggaacggatgcatttcattcacagggatctggcagctagaaattgccttgtttccgtgaaagactataccagtccacggatagtgaagattggagactttggactcgccagagacatctataaaaatgattactatagaaagagaggggaaggcctgctcccagttcggtggatggctccagaaagtttgatggatggaatcttcactactcaatctgatgtatggtcttttggaattctgatttgggagattttaactcttggtcatcagccttatccagctcattccaaccttgatgtgttaaactatgtgcaaacaggagggagactggagccaccaagaaattgtcctgatgatctgtggaatttaatgacccagtgctgggctcaagaacccgaccaaagacctacttttcatagaattcaggaccaacttcagttattcagaaattttttcttaaatagcatttataagtccagagatgaagcaaacaacagtggagtcataaatgaaagctttgaaggtgaagatggcgatgtgatttgtttgaattcagatgacattatgccagttgctttaatggaaacgaagaaccgagaagggttaaactatatggtacttgctacagaatgtggccaaggtgaagaaaagtctgagggtcctctaggctcccaggaatctgaatcttgtggtctgaggaaagaagagaaggaaccacatgcagacaaagatttctgccaagaaaaacaagtggcttactgcccttctggcaagcctgaaggcctgaactatgcctgtctcactcacagtggatatggagatgggtctgattaatagcgttgtttgggaaatagagagttgagataaacactctcattcagtagttactgaaagaaaactctgctagaatgataaatgtcatggtggtctataactccaaataaacaatgcaacgttcc

SEQ ID NO: 87 - protein, 737 aa, Homo sapiens; identical to SEQ ID NO: 18

SEQ ID NO: 88 - DNA, 3900 bp, Homo sapiens
gtgctgtggcggcggcggcggcggtagtggcggcggcggcggtgcctgggcggcagcagcagcagtagcggcagccctgaggacgatatggtgtaagatacttcttcaagattggacagctggggaccttcttctgattaaccttaaaccaacttgtagccatagagacacctcacaaggttcccatttttgttgttgttgttgttgattttctgctcacacctttcctgaccttgcaaccatgtatggaagtgcccgctctgttgggaaggtggagccgagcagccagagccctgggcgttcacccaggcttccacgttcccctcgcttgggtcaccgtcgaaccaacagtacgggagggagttcgggaagcagtgttggaggtggcagtgggaaaaccctttcaatggaaaatatacaatctttaaatgctgcctatgccacctctggccctatgtatctaagtgaccatgaaaatgtgggttcagaaacacctaaaagcaccatgacacttggccgttctgggggacgtctgccttacggtgttcggatgactgctatgggtagtagccccaatatagctagcagtggggttgctagtgacaccatagcatttggagagcatcacctccctcctgtgagtatggcatccactgtacctcactcccttcgtcaggcgagagataacacaatcatggatctgcagacacagctgaaggaagtattaagagaaaatgatctcttgcggaaggatgtggaagtaaaggagagcaaattgagttcttcaatgaatagcatcaagaccttctggagcccagagctgaagaaggaacgagccctgagaaaagatgaagcttccaaaatcaccatttggaaggaacagtacagagttgtacaggaggaaaaccagcacatgcagatgacaatccaggctctccaggatgaattgcggatccagagggacctgaatcagctgtttcagcaggatagtagcagcaggactggcgaaccttgtgtagcagagctgacagaggagaactttcagaggcttcatgctgagcatgagcggcaggccaaagagctgtttcttcttcgaaagacattggaggaaatggagctgcgtattgagactcaaaagcagaccctaaatgctcgggatgaatccattaagaagcttctggaaatgttgcagagcaaaggactttctgccaaggctaccgaggaagaccatgagagaacaagacgactggcagaggcagagatgcacgttcatcacctagaaagccttttggagcagaaggaaaaagagaacagtatgttgagagaggagatgcatcgaaggtttgagaatgctcctgattctgccaaaacaaaagctctgcaaactgttattgagatgaaggattcaaaaatttcctctatggagcgtgggcttcgagacctggaagaggaaattcagatgctgaaatcgaatggtgctttgagtactgaggaaagggaagaagaaatgaagcaaatggaagtgtatcggagccattctaaatttatgaaaaataagattggccaggtgaaacaggagctgtccagaaaggacacagaactactcgccctgcagacaaagctagaaacactcacaaaccagttctcagatagtaaacagcacattgaagtgttgaaggagtccttgactgctaaggagcagagggctgccatcctgcagactgaggtggatgctctccgattgcgtttggaagagaaggaaaccatgttgaataaaaagacaaaacaaattcaggatatggctgaagagaaggggacacaagctggagagatacatgacctcaaggacatgttggatgtgaaggagcggaaggttaatgttcttcagaagaagattgaaaatcttcaagagcagcttagagacaaggaaaagcagatgagcagcttgaaagaacgggtcaaatccttgcaggctgacaccaccaacactgacactgccttgacaactttggaggaggcccttgcagagaaagagcggacaattgaacgcttaaaggagcagagggacagagatgagcgagagaagcaagaggaaattgataactacaaaaaagatcttaaagacttgaaggaaaaagtcagcctgttgcaaggcgacctttcagagaaagaggcttcacttttggatctgaaagagcatgcttcttctctggcatcctcaggactgaaaaaggactcacggcttaagacactagagattgctttggagcagaagaaggaggagtgtctgaaaatggaatcacaattgaaaaaggcacatgaggcagcattggaagccagagccagtccagagatgagtgaccgaatacagcacttggagagagagatcaccaggtacaaagatgaatctagcaaggcccaggcagaagttgatcgactcttagaaatcttgaaggaggtggaaaatgagaagaatgacaaagataagaagatagctgagttggaaagtactcttccaacccaagaggagattgaaaatcttcctgccttccctcgggaaaaactgactctgcgtctcttgctgggaagtggagcctttggagaagtgtatgaaggaacagcagtggacatcttaggagttggaagtggagaaatcaaagtagcagtgaagactttgaagaagggttccacagaccaggagaagattgaattcctgaaggaggcacatctgatgagcaaatttaatcatcccaacattctgaagcagcttggagtttgtctgctgaatgaaccccaatacattatcctggaactgatggagggaggagaccttcttacttatttgcgtaaagcccggatggcaacgttttatggtcctttactcaccttggttgaccttgtagacctgtgtgtagatatttcaaaaggctgtgtctacttggaacggatgcatttcattcacagggatctggcagctagaaattgccttgtttccgtgaaagactataccagtccacggatagtgaagattggagactttggactcgccagagacatctataaaaatgattactatagaaagagaggggaaggcctgctcccagttcggtggatggctccagaaagtttgatggatggaatcttcactactcaatctgatgtatggtcttttggaattctgatttgggagattttaactcttggtcatcagccttatccagctcattccaaccttgatgtgttaaactatgtgcaaacaggagggagactggagccaccaagaaattgtcctgatgatctgtggaatttaatgacccagtgctgggctcaagaacccgaccaaagacctacttttcatagaattcaggaccaacttcagttattcagaaattttttcttaaatagcatttataagtccagagatgaagcaaacaacagtggagtcataaatgaaagctttgaaggtgaagatggcgatgtgatttgtttgaattcagatgacattatgccagttgctttaatggaaacgaagaaccgagaagggttaaactatatggtacttgctacagaatgtggccaaggtgaagaaaagtctgagggtcctctaggctcccaggaatctgaatcttgtggtctgaggaaagaagagaaggaaccacatgcagacaaagatttctgccaagaaaaacaagtggcttactgcccttctggcaagcctgaaggcctgaactatgcctgtctcactcacagtggatatggagatgggtctgattaatagcgttgtttgggaaatagagagttgagataaacactctcattcagtagttactgaaagaaaactctgctagaatgataaatgtcatggtggtctataactccaaataaacaatgcaacgttcc

SEQ ID NO: 89 - protein, 1177 aa, Homo sapiens; identical to SEQ ID NO: 40

SEQ ID NO: 90 - DNA, 2033 bp, Homo sapiens
gcgctgtcgccgccgccgctgcagccggagttggaggagggagaagctaggaagaaaatggcggccgtggctgcagaggcggcagcgactgcagcgtcccccggggaggggggcgccggcgaggccgagccggagatggagcccatccccggcagtgaggccggcactgaccccctcccggtcacggccactgaagcgtctgtgccggatggcgagactgacgggcagcaatccgctcctcaggccgacgagccgccgctcccgccgccaccgccgccgccgggggagctcgcccgcagcccagaggcggtggggccggagctggaggctgaggagaaactgtccgttcgggtggcggagtcggcggcagccgcgcctcagggagggccggaacttccaccttctcctgcatcgccgccggagcagcccccggctcccgaggagcgcgaggagccgccgctgcctcagcccgtagccccggcgctcgtgccgccggcgggcggggactccacggtgtcgcaactgatcccgggctcggaggtgcgggtcacgctggaccacatcattgaggacgcgcttgtcgtgtcgttccgcttcggggagaagctcttctccggggtcctcatggatctgtccaaaagtactcttccaacccaagaggagattgaaaatcttcctgccttccctcgggaaaaactgactctgcgtctcttgctgggaagtggagcctttggagaagtgtatgaaggaacagcagtggacatcttaggagttggaagtggagaaatcaaagtagcagtgaagactttgaagaagggttccacagaccaggagaagattgaattcctgaaggaggcacatctgatgagcaaatttaatcatcccaacattctgaagcagcttggagtttgtctgctgaatgaaccccaatacattatcctggaactgatggagggaggagaccttcttacttatttgcgtaaagcccggatggcaacgttttatggtcctttactcaccttggttgaccttgtagacctgtgtgtagatatttcaaaaggctgtgtctacttggaacggatgcatttcattcacagggatctggcagctagaaattgccttgtttccgtgaaagactataccagtccacggatagtgaagattggagactttggactcgccagagacatctataaaaatgattactatagaaagagaggggaaggcctgctcccagttcggtggatggctccagaaagtttgatggatggaatcttcactactcaatctgatgtatggtcttttggaattctgatttgggagattttaactcttggtcatcagccttatccagctcattccaaccttgatgtgttaaactatgtgcaaacaggagggagactggagccaccaagaaattgtcctgatgatctgtggaatttaatgacccagtgctgggctcaagaacccgaccaaagacctacttttcatagaattcaggaccaacttcagttattcagaaattttttcttaaatagcatttataagtccagagatgaagcaaacaacagtggagtcataaatgaaagctttgaaggtgaagatggcgatgtgatttgtttgaattcagatgacattatgccagttgctttaatggaaacgaagaaccgagaagggttaaactatatggtacttgctacagaatgtggccaaggtgaagaaaagtctgagggtcctctaggctcccaggaatctgaatcttgtggtctgaggaaagaagagaaggaaccacatgcagacaaagatttctgccaagaaaaacaagtggcttactgcccttctggcaagcctgaaggcctgaactatgcctgtctcactcacagtggatatggagatgggtctgattaatagcgttgtttgggaaatagagagttgagataaacactctcattcagtagttactgaaagaaaactctgctagaatgataaatgtcatggtggtctataactccaaataaacaatgcaacgttcc

SEQ ID NO: 91 - protein, 616 aa, Homo sapiens; identical to SEQ ID NO: 32

SEQ ID NO: 92 - DNA, 5161 bp, Homo sapiens
gctgctgctgcagtgggacaggtggcggcgaccggcggcgtccgaggagatttaatccagagactgacttcactatagaacccacagttgtatcaatggttggggaaagatagtggcaacaggcaaaggagaaacagctctgacatacaaagaaaatgagtatgctaaagccaagtgggcttaaggcccccaccaagatcctgaagcctggaagcacagctctgaagacacctacggctgttgtagctccagtagaaaaaaccatatccagtgaaaaagcatcaagcactccatcatctgagactcaggaggaatttgtggatgactttcgagttggggagcgagtttgggtgaatggaaataagcctggatttatccagtttcttggagaaacccagtttgcaccaggccagtgggctggaattgttttagatgaacccataggcaagaacgatggttcggtggcaggagttcggtatttccagtgtgaacctttaaagggcatatttacccgaccttcaaagttaacaaggaaggtgcaagcagaagatgaagctaatggcctgcagacaacgcccgcctcccgagctacttcaccgctgtgcacttctacggccagcatggtgtcttcctccccctccaccccttcaaacatccctcagaaaccatcacagccagcagcaaaggaaccttcagctacgcctccgatcagcaaccttacaaaaactgccagtgaatctatctccaacctttcagaggctggctcaatcaagaaaggagaaagagagctcaaaatcggagacagagtattggttggtggcactaaggctggtgtagtccggtttcttggggagaccgactttgccaagggggagtggtgtggcgtggagttagatgagccacttgggaagaatgatggcgctgttgctggaacaaggtattttcagtgtcaacccaaatatggcttgttcgctcctgtccacaaagttaccaagattggcttcccttccactacaccagccaaagccaaggccaacgcagtgaggcgagtgatggcgaccacgtccgccagcctgaagcgcagcccttctgcctcttccctcagctccatgagctcagtggcctcctctgtgagcagcaggcccagtcggacaggactattgactgaaacctcctcccgttacgccaggaagatctccggtaccactgccctccaggaggccctgaaggagaagcagcagcacattgagcagctgctggcggaacgggatctggagagggcggaggtggccaaggccacgagccacgtgggggagatagagcaggagctagctctggcccgggacggacatgaccagcatgtcctggaattggaagccaaaatggaccagctgcgaacaatggtggaagctgctgacagggagaaggtggagcttctcaaccagcttgaagaggagaaaaggaaggttgaggaccttcagttccgggttgaagaagaatcaattaccaaaggtgatcttgagacgcagaccaaactggagcatgcccgcattaaggagcttgaacagagcctgctctttgaaaagaccaaagctgacaaactccagagggagttagaagacactagggtggctacagtttcagaaaagtcacgtataatggaactggagaaagacctagcattgagagtacaggaagtagctgagctccgaagaaggctagagtccaataagcctgctggggatgtggacatgtcactttcccttttgcaagagataagctctttgcaagaaaagttagaagtcacccgtactgaccaccagagagaaataacttctctgaaggagcattttggagcccgggaagaaactcatcagaaggagataaaggctctgtataccgccacggaaaagctttccaaagagaacgagtcattgaaaagcaagctggagcatgccaacaaagagaactcagatgtgatagctctatggaagtccaaactggagactgccatcgcatcccaccagcaggcgatggaagaactgaaggtatctttcagcaaagggcttggaacagagacggcagaatttgctgaactaaaaacacaaatagagaaaatgagactagattaccaacacgaaatagaaaatttgcagaatcaacaagactctgaacgggctgcccatgctaaagagatggaagccttgagggctaaactgatgaaagttattaaagaaaaggaaaacagtctggaagccatcaggtcgaaactggacaaagcagaagaccagcatctcgtagaaatggaagacacgttaaacaaattacaggaagctgaaataaaggtaaaggagctagaggtactgcaagccaaatgcaatgaacaaaccaaggttattgataattttacatcacagctcaaggctactgaagaaaagctcttggatcttgatgcacttcggaaagccagttccgaaggtaaatcggaaatgaagaaacttagacagcagcttgaggcagctgagaaacagattaaacatttagagattgaaaagaatgctgaaagtagcaaggctagtagcattaccagagagctccaggggagagagctaaagcttactaaccttcaggaaaatttgagtgaagtcagtcaagtgaaagagactttggaaaaagaacttcagattttgaaagaaaagtttgctgaagcttcagaggaggcagtctctgttcagagaagtatgcaagaaactgtaaataagttacaccaaaaggaggaacagtttaacatgctgtcttctgacttggagaagctgagagaaaacttagcagatatggaggcaaaatttagagagaaagatgagagagaagagcagctgataaaggcaaaggaaaaactggaaaatgacattgcagaaataatgaagatgtcaggagataactcttctcagctgacaaaaatgaacgatgaattacgtctgaaagaaagagatgtagaagaattacagctaaaacttacaaaggctaatgaaaatgcaagttttctgcaaaaaagtattgaggacatgactgtcaaagctgaacagagccagcaagaagcagctaaaaagcatgaggaagaaaagaaagaattggagaggaaattgtcggacctggaaaagaaaatggaaacaagccacaaccagtgtcaggagctgaaagccaggtatgagagagccacttctgagacaaaaaccaagcatgaagaaatcctacagaacctccagaagacgctgctggacacagaggacaagctgaagggcgcacgggaggagaacagtggcttgctgcaggagctggaggagctgagaaagcaagccgacaaagccaaagctgctcaaacagcggaagatgccatgcagataatggaacagatgaccaaagagaagactgagactctggcctccttggaggacaccaagcaaacaaatgcaaaactacagaatgaattggacacacttaaagaaaacaacttgaaaaatgtggaagagctgaacaaatcaaaagaactcctgactgtagagaatcaaaaaatggaagaatttaggaaagaaatagaaaccctaaagcaggcagcagctcagaagtcccagcagctttcagcgttgcaagaagagaacgttaaacttgctgaggagctggggagaagcagggacgaagtcacaagtcatcaaaagctggaagaagaaagatctgtgctcaataatcagttgttagaaatgaaaaaaagtactcttccaacccaagaggagattgaaaatcttcctgccttccctcgggaaaaactgactctgcgtctcttgctgggaagtggagcctttggagaagtgtatgaaggaacagcagtggacatcttaggagttggaagtggagaaatcaaagtagcagtgaagactttgaagaagggttccacagaccaggagaagattgaattcctgaaggaggcacatctgatgagcaaatttaatcatcccaacattctgaagcagcttggagtttgtctgctgaatgaaccccaatacattatcctggaactgatggagggaggagaccttcttacttatttgcgtaaagcccggatggcaacgttttatggtcctttactcaccttggttgaccttgtagacctgtgtgtagatatttcaaaaggctgtgtctacttggaacggatgcatttcattcacagggatctggcagctagaaattgccttgtttccgtgaaagactataccagtccacggatagtgaagattggagactttggactcgccagagacatctataaaaatgattactatagaaagagaggggaaggcctgctcccagttcggtggatggctccagaaagtttgatggatggaatcttcactactcaatctgatgtatggtcttttggaattctgatttgggagattttaactcttggtcatcagccttatccagctcattccaaccttgatgtgttaaactatgtgcaaacaggagggagactggagccaccaagaaattgtcctgatgatctgtggaatttaatgacccagtgctgggctcaagaacccgaccaaagacctacttttcatagaattcaggaccaacttcagttattcagaaattttttcttaaatagcatttataagtccagagatgaagcaaacaacagtggagtcataaatgaaagctttgaaggtgaagatggcgatgtgatttgtttgaattcagatgacattatgccagttgctttaatggaaacgaagaaccgagaagggttaaactatatggtacttgctacagaatgtggccaaggtgaagaaaagtctgagggtcctctaggctcccaggaatctgaatcttgtggtctgaggaaagaagagaaggaaccacatgcagacaaagatttctgccaagaaaaacaagtggcttactgcccttctggcaagcctgaaggcctgaactatgcctgtctcactcacagtggatatggagatgggtctgattaatagcgttgtttgggaaatagagagttgagataaacactctcattcagtagttactgaaagaaaactctgctagaatgataaatgtcatggtggtctataactccaaataaacaatgcaacgttcc

SEQ ID NO: 93 - protein, 1626 aa, Homo sapiens; identical to SEQ ID NO: 14

SEQ ID NO: 94 - DNA, 1884 bp, Homo sapiens
agataaagactcaagtctggggacctcctggtcactcaggcagcagccccttctttcttgccccagtctccagttctccagtgttcacaggtgagcctaccaacagccactgctcatgatggaggccatcaagaaaaagatgcagatgctgaagttagacaaggagaatgctctggatcgggcagagcaagctgaagctgagcagaagcaggcagaagaaagaagtaaacagctggaggatgagctggcagccatgcagaagaagctgaaagggacagaggatgagctggacaagtattctgaagctttgaaggatgcccaggagaagctggaactggcagagaagaaggctgctgatgctgaggctgaggtggcctccttgaaccgtaggatccagctggttgaagaagagctggaccgtgctcaggagcgcctggccactgccctgcaaaagctggaagaagctgaaaaagctgctgatgagagtgagagtactcttccaacccaagaggagattgaaaatcttcctgccttccctcgggaaaaactgactctgcgtctcttgctgggaagtggagcctttggagaagtgtatgaaggaacagcagtggacatcttaggagttggaagtggagaaatcaaagtagcagtgaagactttgaagaagggttccacagaccaggagaagattgaattcctgaaggaggcacatctgatgagcaaatttaatcatcccaacattctgaagcagcttggagtttgtctgctgaatgaaccccaatacattatcctggaactgatggagggaggagaccttcttacttatttgcgtaaagcccggatggcaacgttttatggtcctttactcaccttggttgaccttgtagacctgtgtgtagatatttcaaaaggctgtgtctacttggaacggatgcatttcattcacagggatctggcagctagaaattgccttgtttccgtgaaagactataccagtccacggatagtgaagattggagactttggactcgccagagacatctataaaaatgattactatagaaagagaggggaaggcctgctcccagttcggtggatggctccagaaagtttgatggatggaatcttcactactcaatctgatgtatggtcttttggaattctgatttgggagattttaactcttggtcatcagccttatccagctcattccaaccttgatgtgttaaactatgtgcaaacaggagggagactggagccaccaagaaattgtcctgatgatctgtggaatttaatgacccagtgctgggctcaagaacccgaccaaagacctacttttcatagaattcaggaccaacttcagttattcagaaattttttcttaaatagcatttataagtccagagatgaagcaaacaacagtggagtcataaatgaaagctttgaaggtgaagatggcgatgtgatttgtttgaattcagatgacattatgccagttgctttaatggaaacgaagaaccgagaagggttaaactatatggtacttgctacagaatgtggccaaggtgaagaaaagtctgagggtcctctaggctcccaggaatctgaatcttgtggtctgaggaaagaagagaaggaaccacatgcagacaaagatttctgccaagaaaaacaagtggcttactgcccttctggcaagcctgaaggcctgaactatgcctgtctcactcacagtggatatggagatgggtctgattaatagcgttgtttgggaaatagagagttgagataaacactctcattcagtagttactgaaagaaaactctgctagaatgataaatgtcatggtggtctataactccaaataaacaatgcaacgttcc

SEQ ID NO: 95 - protein, 547 aa, Homo sapiens; identical to SEQ ID NO: 22

SEQ ID NO: 96 - DNA, 1790 bp, Homo sapiens
gccccgtgtgcagctttcgcggcctgcgtctggagaaaaccctagcgggtggctccgtgcggccagagctctagagagtggtgccgccttccaaccttcttccccaagccctggtggccggctccgcctcttctcgaatcttttccacagcccaaaatggccgcagaggtgtattttggcgatctagagctcttcgagccgttcgaccacccagaggagtcgattccgaagcccgttcacactcgcttcaaggacgacgacggcgacgaggaggacgaaaatggggtcggcgacgcggagctacgggagcggcttcggcagtgcgaggagaccatcgagcagctccgcgccgagaatcaagaacttaaacgaaaattgaacattctgactcgaccgagtactcttccaacccaagaggagattgaaaatcttcctgccttccctcgggaaaaactgactctgcgtctcttgctgggaagtggagcctttggagaagtgtatgaaggaacagcagtggacatcttaggagttggaagtggagaaatcaaagtagcagtgaagactttgaagaagggttccacagaccaggagaagattgaattcctgaaggaggcacatctgatgagcaaatttaatcatcccaacattctgaagcagcttggagtttgtctgctgaatgaaccccaatacattatcctggaactgatggagggaggagaccttcttacttatttgcgtaaagcccggatggcaacgttttatggtcctttactcaccttggttgaccttgtagacctgtgtgtagatatttcaaaaggctgtgtctacttggaacggatgcatttcattcacagggatctggcagctagaaattgccttgtttccgtgaaagactataccagtccacggatagtgaagattggagactttggactcgccagagacatctataaaaatgattactatagaaagagaggggaaggcctgctcccagttcggtggatggctccagaaagtttgatggatggaatcttcactactcaatctgatgtatggtcttttggaattctgatttgggagattttaactcttggtcatcagccttatccagctcattccaaccttgatgtgttaaactatgtgcaaacaggagggagactggagccaccaagaaattgtcctgatgatctgtggaatttaatgacccagtgctgggctcaagaacccgaccaaagacctacttttcatagaattcaggaccaacttcagttattcagaaattttttcttaaatagcatttataagtccagagatgaagcaaacaacagtggagtcataaatgaaagctttgaaggtgaagatggcgatgtgatttgtttgaattcagatgacattatgccagttgctttaatggaaacgaagaaccgagaagggttaaactatatggtacttgctacagaatgtggccaaggtgaagaaaagtctgagggtcctctaggctcccaggaatctgaatcttgtggtctgaggaaagaagagaaggaaccacatgcagacaaagatttctgccaagaaaaacaagtggcttactgcccttctggcaagcctgaaggcctgaactatgcctgtctcactcacagtggatatggagatgggtctgattaatagcgttgtttgggaaatagagagttgagataaacactctcattcagtagttactgaaagaaaactctgctagaatgataaatgtcatggtggtctataactccaaataaacaatgcaacgttcc

SEQ ID NO: 97 - protein, 502 aa, Homo sapiens; identical to SEQ ID NO: 24

SEQ ID NO: 98 - DNA, 3033 bp, Homo sapiens
agataaagactcaagtctggggacctcctggtcactcaggcagcagccccttctttcttgccccagtctccagttctccagtgttcacaggtgagcctaccaacagccactgctcatgatggaggccatcaagaaaaagatgcagatgctgaagttagacaaggagaatgctctggatcgggcagagcaagctgaagctgagcagaagcaggcagaagaaagaagtaaacagctggaggatgagctggcagccatgcagaagaagctgaaagggacagaggatgagctggacaagtattctgaagctttgaaggatgcccaggagaagctggaactggcagagaagaaggctgctgatgctgaggctgaggtggcctccttgaaccgtaggatccagctggttgaagaagagctggaccgtgctcaggagcgcctggccactgccctgcaaaagctggaagaagctgaaaaagctgctgatgagagtgagagaggtatgaaggttattgaaaaccgggccttaaaagatgaagaaaagatggaactccaggaaatccaactcaaagaagctaagcacattgcagaagaggcagataggaagtatgaagaggtggctcgtaagttggtgatcattgaaggagacttggaacgcacagaggaacgagctgagctggcagagtctaagtgttctgagctggaggaggagctgaagaatgtcaccaacaacctcaagtctcttgaggctcaggcggagaagtactctcaaaaagaagataaatatgaggaagaaatcaagattcttactgataaactcaaggaggcagagacccgtgctgagtttgctgagagatcggtagccaagctggaaaagacaattgatgacctggaagtgtaccgccggaagcaccaggagctgcaagccatgcagatggagctgcagagccctgagtacaagctgagcaagctccgcacctcgaccatcatgaccgactacaaccccaactactgctttgctggcaagacctcctccatcagtgacctgaaggaggtgccgcggaaaaacatcaccctcattcggggtctgggccatggcgcctttggggaggtgtatgaaggccaggtgtccggaatgcccaacgacccaagccccctgcaagtggctgtgaagacgctgcctgaagtgtgctctgaacaggacgaactggatttcctcatggaagccctgatcatcagcaaattcaaccaccagaacattgttcgctgcattggggtgagcctgcaatccctgccccggttcatcctgctggagctcatggcggggggagacctcaagtccttcctccgagagacccgccctcgcccgagccagccctcctccctggccatgctggaccttctgcacgtggctcgggacattgcctgtggctgtcagtatttggaggaaaaccacttcatccaccgagacattgctgccagaaactgcctcttgacctgtccaggccctggaagagtggccaagattggagacttcgggatggcccgagacatctacagggcgagctactatagaaagggaggctgtgccatgctgccagttaagtggatgcccccagaggccttcatggaaggaatattcacttctaaaacagacacatggtcctttggagtgctgctatgggaaatcttttctcttggatatatgccataccccagcaaaagcaaccaggaagttctggagtttgtcaccagtggaggccggatggacccacccaagaactgccctgggcctgtataccggataatgactcagtgctggcaacatcagcctgaagacaggcccaactttgccatcattttggagaggattgaatactgcacccaggacccggatgtaatcaacaccgctttgccgatagaatatggtccacttgtggaagaggaagagaaagtgcctgtgaggcccaaggaccctgagggggttcctcctctcctggtctctcaacaggcaaaacgggaggaggagcgcagcccagctgccccaccacctctgcctaccacctcctctggcaaggctgcaaagaaacccacagctgcagagatctctgttcgagtccctagagggccggccgtggaagggggacacgtgaatatggcattctctcagtccaaccctccttcggagttgcacaaggtccacggatccagaaacaagcccaccagcttgtggaacccaacgtacggctcctggtttacagagaaacccaccaaaaagaataatcctatagcaaagaaggagccacacgacaggggtaacctggggctggagggaagctgtactgtcccacctaacgttgcaactgggagacttccgggggcctcactgctcctagagccctcttcgctgactgccaatatgaaggaggtacctctgttcaggctacgtcacttcccttgtgggaatgtcaattacggctaccagcaacagggcttgcccttagaagccgctactgcccctggagctggtcattacgaggataccattctgaaaagcaagaatagcatgaaccagcctgggccctgagctcggtcgcacactcacttctcttccttgggatccctaagaccgtggaggagagagaggcaatggctccttcacaaaccagagaccaaatgtcacgttttgttttgtgccaacctattttgaagtaccaccaaaaaagctgtattttgaaaatgctttagaaaggttttgagcatgggttcatcctattctttcgaaagaagaaaatatcataaaaatgagtgataaatacaaggcccagatgtggttgcataaggtttttatgcatgtttgttgtatacttccttatgcttctttcaaattgtgtgtgctctgcttcaatgtagtcagaattagctgcttctatgtttcatagttggggtcatagatgtttccttgccttgttgatgtggacatgagccatttgaggggagagggaacggaaataaaggagttatttgtaatgactaaaa

SEQ ID NO: 99 - protein, 821 aa, Homo sapiens; identical to SEQ ID NO: 44

SEQ ID NO: 100 - DNA, 4232 bp, Homo sapiens
ctcctcccgcaccgccctgtcgcccaacggcggcctcaggagtgatcgggcagcagtcggccggccagcggacggcagagcgggcggacgggtaggcccggcctgctcttcgcgaggaggaagaaggtggccactctcccggtccccagaacctccccagcccccgcagtccgcccagaccgtaaagggggacgctgaggagccgcggacgctctccccggtgccgccgccgctgccgccgccatggctgccatgatggatcggaagtgagcattagggttaacggctgccggcgccggctcttcaagtcccggctccccggccgcctccacccggggaagcgcagcgcggcgcagctgactgctgcctctcacggccctcgcgaccacaagccctcaggtccggcgcgttccctgcaagactgagcggcggggagtggctcccggccgccggccccggctgcgagaaagatggcggacctggccgagtgcaacatcaaagtgatgtgtcgcttcagacctctcaacgagtctgaagtgaaccgcggcgacaagtacatcgccaagtttcagggagaagacacggtcgtgatcgcgtccaagccttatgcatttgatcgggtgttccagtcaagcacatctcaagagcaagtgtataatgactgtgcaaagaagattgttaaagatgtacttgaaggatataatggaacaatatttgcatatggacaaacatcctctgggaagacacacacaatggagggtaaacttcatgatccagaaggcatgggaattattccaagaatagtgcaagatatttttaattatatttactccatggatgaaaatttggaatttcatattaaggtttcatattttgaaatatatttggataagataagggacctgttagatgtttcaaagaccaacctttcagttcatgaagacaaaaaccgagttccctatgtaaaggggtgcacagagcgttttgtatgtagtccagatgaagttatggataccatagatgaaggaaaatccaacagacatgtagcagttacaaatatgaatgaacatagctctaggagtcacagtatatttcttattaatgtcaaacaagagaacacacaaacggaacaaaagctgagtggaaaactttatctggttgatttagctggtagtgaaaaggttagtaaaactggagctgaaggtgctgtgctggatgaagctaaaaacatcaacaagtcactttctgctcttggaaatgttatttctgctttggctgagggtagtacatatgttccatatcgagatagtaaaatgacaagaatccttcaagattcattaggtggcaactgtagaaccactattgtaatttgctgctctccatcatcatacaatgagtctgaaacaaaatctacactcttatttggccaaagggccaaaacaattaagaacacagtttgtgtcaatgtggagttaactgcagaacagtggaaaaagaagtatgaaaaagaaaaagaaaaaaataagatcctgcggaacactattcagtggcttgaaaatgagctcaacagatggcgtaatggggagacggtgcctattgatgaacagtttgacaaagagaaagccaacttggaagctttcacagtggataaagatattactcttaccaatgataaaccagcaaccgcaattggagttataggaaattttactgatgctgaaagaagaaagtgtgaagaagaaattgctaaattatacaaacagcttgatgacaaggatgaagaaattaaccagcaaagtcaactggtagagaaactgaagacgcaaatgttggatcaggaggagcttttggcatctaccagaagggatcaagacaatatgcaagctgagctgaatcgccttcaagcagaaaatgatgcctctaaagaagaagtgaaagaagttttacaggccctagaagaacttgctgtcaattatgatcagaagtctcaggaagttgaagacaaaactaaggaatatgaattgcttagtgatgaattgaatcagaaatcggcaactttagcgagtatagatgctgagcttcagaaacttaaggaaatgaccaaccaccagaaaaaacgagcagctgagatgatggcatctttactaaaagaccttgcagaaataggaattgctgtgggaaataatgatgtaaagcagcctgagggaactggcatgatagatgaagagttcactgttgcaagactctacattagcaaaatgaagtcagaagtaaaaaccatggtgaaacgttgcaagcagttagaaagcacacaaactgagagcaacaaaaaaatggaagaaaatgaaaaggagttagcagcatgtcagcttcgtatctctcaagaggatccaaagtgggaattccctcggaagaacttggttcttggaaaaactctaggagaaggcgaatttggaaaagtggtcaaggcaacggccttccatctgaaaggcagagcagggtacaccacggtggccgtgaagatgctgaaagagaacgcctccccgagtgagcttcgagacctgctgtcagagttcaacgtcctgaagcaggtcaaccacccacatgtcatcaaattgtatggggcctgcagccaggatggcccgctcctcctcatcgtggagtacgccaaatacggctccctgcggggcttcctccgcgagagccgcaaagtggggcctggctacctgggcagtggaggcagccgcaactccagctccctggaccacccggatgagcgggccctcaccatgggcgacctcatctcatttgcctggcagatctcacaggggatgcagtatctggccgagatgaagctcgttcatcgggacttggcagccagaaacatcctggtagctgaggggcggaagatgaagatttcggatttcggcttgtcccgagatgtttatgaagaggattcctacgtgaagaggagccagggtcggattccagttaaatggatggcaattgaatccctttttgatcatatctacaccacgcaaagtgatgtatggtcttttggtgtcctgctgtgggagatcgtgaccctagggggaaacccctatcctgggattcctcctgagcggctcttcaaccttctgaagaccggccaccggatggagaggccagacaactgcagcgaggagatgtaccgcctgatgctgcaatgctggaagcaggagccggacaaaaggccggtgtttgcggacatcagcaaagacctggagaagatgatggttaagaggagagactacttggaccttgcggcgtccactccatctgactccctgatttatgacgacggcctctcagaggaggagacaccgctggtggactgtaataatgcccccctccctcgagccctcccttccacatggattgaaaacaaactctatggtagaatttcccatgcatttactagattctagcaccgctgtcccctctgcactatccttcctctctgtgatgctttttaaaaatgtttctggtctgaacaaaaccaaagtctgctctgaacctttttatttgtaaatgtctgactttgcatccagtttacatttaggcattattgcaactatgtttttctaaaaggaagtgaaaataagtgtaattaccacattgcccagcaacttaggatggtagaggaaaaaacagatcagggcggaactctcaggggagaccaagaacaggttgaataaggcgcttctggggtgggaatcaagtcatagtacttctactttaactaagtggataaatatacaaatctggggaggtattcagttgagaaaggagccaccagcaccactcagcctgcactgggagcacagccaggttcccccagacccctcctgggcaggcaggtgcctctcagaggccacccggcactggcgagcagccactggccaagcctcagccccagtcccagccacatgtcctccatcaggggtagcgaggttgcaggagctggctggccctgggaggacgcacccccactgctgttttcacatcctttcccttacccaccttcaggacggttgtcacttatgaagtcagtgctaaagctggagcagttgctttttgaaagaacatggtctgtggtgctgtggtcttacaatggacagtaaatatggttcttgccaaaactccttcttttgtctttgattaaatactagaaatttaaaaaaaaaaaaaaa

SEQ ID NO: 101 - protein, 998 aa, Homo sapiens; identical to SEQ ID NO: 54

SEQ ID NO: 102 - DNA, 3521 bp, Homo sapiens
gcttcccttccacgtctcccggaagcggtagcagggccccggcgggtcggggaggaggtttactcagcttgggccccctccgggccagccgccgagggggcgcggcccaggacggcggctaggccgtagtgcagcctctccggagtcctcaggtttgccaataggattatcctgctgccatcatgtcttggtttgttgatcttgctggaaaggcagaagatcttttaaaccgagttgatcaaggggctgcaacagctctcagtaggaaagacaatgccagcaacatatatagcaaaaatactgactatactgaacttcaccagcaaaatacagatttgatatatcagactggacctaaatctacgtatatttcatcagcagctgataacattcgaaatcaaaaagccaccatcttagctggcactgcaaatgtgaaagtaggatctcggacaccagtagaggcctctcatcctgttgaaaatgcatctgttcctaggccttcatcccattttgtgcgaagaaaaaagtcagaacctgatgatgagctgctgtttgattttcttaatagttcacagaaggagcctaccgggagggtggaaatcagaaaggaaaaaggcaagacacctgtctttcagagctctcagacatcaagtgtcagttctgtgaaccccagtgtaaccaccatcaaaaccattgaagaaaattcttttgggagccaaacccacgaagctgccagtaactcagattctagccatgaaggtcaagaggaatcttcaaaggaaaatgtgtcatcaaatgctgcctgccctgaccacaccccaacacctaatgatgatggcaaatcacatgaactgtctaaccttcgactggagaatcagctgctgaggaatgaagttcagtctttaaatcaagaaatggcctcgttactccaaagatccaaagagactcaagaagaattaaacaaagcaagagcaagagttgaaaagtggaatgctgaccattcaaagagtgatcgaatgactcgaggactccgagcccaagtagatgacctgactgaagctgtggctgcaaaggattcccagctggctgtactgaaagtgagactccaggaagctgaccagctactgagtactcgcacagaagcattagaagccttacagagtgaaaaatcacgaataatgcaggatcaaagtgaaggtaacagcctgcagaatcaagctctgcagacttttcaggagagactgcatgaagcggatgccactctgaagagagagcaggagagctataaacagatgcagagcgagtttgctgcacgccttaataaagtggaaatggaacgtcagaatttagcagaagcaattacactggccgaaagaaaatactcagatgagaagaagagggttgatgaactgcagcagcaagtcaagctgtataagttgaacttggagtcctctaagcaggaattaattgactacaagcaaaaagctactagaatactgcaatctaaggaaaaattgattaacagcttgaaagaaggctctggttttgaaggcctagatagcagcactgccagtagcatggagctggaagaacttcggcatgagaaagagatgcagagggaggaaatacagaagctgatgggccagatacatcagctcagatccgaattacaggaggatccaaagtgggaattccctcggaagaacttggttcttggaaaaactctaggagaaggcgaatttggaaaagtggtcaaggcaacggccttccatctgaaaggcagagcagggtacaccacggtggccgtgaagatgctgaaagagaacgcctccccgagtgagcttcgagacctgctgtcagagttcaacgtcctgaagcaggtcaaccacccacatgtcatcaaattgtatggggcctgcagccaggatggcccgctcctcctcatcgtggagtacgccaaatacggctccctgcggggcttcctccgcgagagccgcaaagtggggcctggctacctgggcagtggaggcagccgcaactccagctccctggaccacccggatgagcgggccctcaccatgggcgacctcatctcatttgcctggcagatctcacaggggatgcagtatctggccgagatgaagctcgttcatcgggacttggcagccagaaacatcctggtagctgaggggcggaagatgaagatttcggatttcggcttgtcccgagatgtttatgaagaggattcctacgtgaagaggagccagggtcggattccagttaaatggatggcaattgaatccctttttgatcatatctacaccacgcaaagtgatgtatggtcttttggtgtcctgctgtgggagatcgtgaccctagggggaaacccctatcctgggattcctcctgagcggctcttcaaccttctgaagaccggccaccggatggagaggccagacaactgcagcgaggagatgtaccgcctgatgctgcaatgctggaagcaggagccggacaaaaggccggtgtttgcggacatcagcaaagacctggagaagatgatggttaagaggagagactacttggaccttgcggcgtccactccatctgactccctgatttatgacgacggcctctcagaggaggagacaccgctggtggactgtaataatgcccccctccctcgagccctcccttccacatggattgaaaacaaactctatggtagaatttcccatgcatttactagattctagcaccgctgtcccctctgcactatccttcctctctgtgatgctttttaaaaatgtttctggtctgaacaaaaccaaagtctgctctgaacctttttatttgtaaatgtctgactttgcatccagtttacatttaggcattattgcaactatgtttttctaaaaggaagtgaaaataagtgtaattaccacattgcccagcaacttaggatggtagaggaaaaaacagatcagggcggaactctcaggggagaccaagaacaggttgaataaggcgcttctggggtgggaatcaagtcatagtacttctactttaactaagtggataaatatacaaatctggggaggtattcagttgagaaaggagccaccagcaccactcagcctgcactgggagcacagccaggttcccccagacccctcctgggcaggcaggtgcctctcagaggccacccggcactggcgagcagccactggccaagcctcagccccagtcccagccacatgtcctccatcaggggtagcgaggttgcaggagctggctggccctgggaggacgcacccccactgctgttttcacatcctttcccttacccaccttcaggacggttgtcacttatgaagtcagtgctaaagctggagcagttgctttttgaaagaacatggtctgtggtgctgtggtcttacaatggacagtaaatatggttcttgccaaaactccttcttttgtctttgattaaatactagaaatttaaaaaaaaaaaaaaa

SEQ ID NO: 103 - protein, 857 aa, Homo sapiens; identical to SEQ ID NO: 46

SEQ ID NO: 104 - DNA, 3712 bp, Homo sapiens
cctgcggcgggctttagggagtggtccctggctgtggatagatctgctgatgagtccaggccccggtccattctcctcgcgctgcaaggatgctcctgggatttcggagaggccgcaggagtcatttcaaacacatcatccatggccttttacctgcagccagcgttgctccgaaggcagctgtgccacgcacacctcctccccgcagccccaacccatctccagagagaccaagatctgctctggcagcagccattctggcgacaacattgactgggcggacggttgctattcctcagcctcgccagaggtcccggtctgagagtgatgtgagcagtgttgaacaggacagcttcatcgagccctatgccaccacctcacagctgaggcctcggccaaattggcagagtgagatgggaagaagatcttctttgccatcctttgaaacactggactatggggacgaagaggacattgaaactcagctgtcatccagcggcaaggaattgggggatgtcagtgcccgggaggacagaggaggccacagtgatgacctgtacgctgtgccacacagaaatcaggtgccattgttacatgaggtgaacagtgaagacgatgaaaatatttctcatcaagatgggtttccaggctcccctcctgcaccacagcggacacaacaaaaagatggtaaacaccctgttctgaatttaaaggatgaaaaacctccattatgtgagaaacctccaccctccccagatataactggtagagcacgtcaaagatatacagaaataaccagagaaaagtttgaggcattaaaagaagaaaatatggacctaaacaatatgaatcaaagccttacccttgaactaaacacaatgaaacaagcaatgaaagaactacagttaaaacttaagggaatggaaaaagagaagagaaagctcaaagaggctgagaaggcgtcgtcacaggaagttgctgcacctgaattactttatctgcgaaaacaagctcaagaactggtggatgaaaatgatggattgaaaatgactgtccatcgtttgaatgtagaactcagtcgatatcagacaaaattcaggcatttgtccaaggaagagagcttaaatattgaaggcctcccatccaagggccctataccaccctggttgttggatataaagtacctgtcaccattgttgctggcttatgaagatatgatgaaagagaaggacgagctcaatgccaccctcaaggaggaaatgagaatgtttaggatgcgagtccaagaagtggtgaaagaaaatgaagaattgcaccaagagttaaataagagtagtgctgttaccagtgaggaatggcgtcagcttcagactcaagcaaaactggttttagaggaaaacaagttgttgctggagcagttggagattcagcaaaggaaagccaaggacagccaccaggagcgcctccaagaagtttctaagctgactaaacaactaatgctcctggaggcaaaaacccacggccaggaaaaggagctggcggagaacagggaacagctggagattttacgtgccaaatgccaagaactcaaaacacactcggatggcaaaatcgcagtggaagttcataaatcaattgtgaatgaattaaaaagccaattacagaaggaagaagagaaagaaagggctgagatggaggagttgatggagaagctgacagtcctgcaagcgcagaagaagagcctgctgttagagaagaacagtttgacagagcaaaacaaagcactggaagccgaacttgaacgagcacagaaaatcaataggaaatctcaaaagaaaattgaggtcctcaaaaagcaggtggaaaaagccatggggaacgaaatgtctgctcatcagtacctggcaaaccttgttggcctggcagaaaatataacccaggaacgtgacagtcttatgtgtttggacttgattagagaccaaggatttcgtggtgatggaggatcaaccacaggtttgtctgctaccccccctgcctcattacctggctcactaactaacgtgaaagccttacagaaatctccaggacctcagcgagaaaggaagtcatcttcatcctcagaagacaggaatcgaatgaaaacacttggtagacgggactcgagtgatgattgggagattcctgatgggcagattacagtgggacaaagaattggatctggatcatttggaacagtctacaagggaaagtggcatggtgatgtggcagtgaaaatgttgaatgtgacagcacctacacctcagcagttacaagccttcaaaaatgaagtaggagtactcaggaaaacacgacatgtgaatatcctactcttcatgggctattccacaaagccacaactggctattgttacccagtggtgtgagggctccagcttgtatcaccatctccatatcattgagaccaaatttgagatgatcaaacttatagatattgcacgacagactgcacagggcatggattacttacacgccaagtcaatcatccacagagacctcaagagtaataatatatttcttcatgaagacctcacagtaaaaataggtgattttggtctagctacagtgaaatctcgatggagtgggtcccatcagtttgaacagttgtctggatccattttgtggatggcaccagaagtcatcagaatgcaagataaaaatccatacagctttcagtcagatgtatatgcatttggaattgttctgtatgaattgatgactggacagttaccttattcaaacatcaacaacagggaccagataatttttatggtgggacgaggatacctgtctccagatctcagtaaggtacggagtaactgtccaaaagccatgaagagattaatggcagagtgcctcaaaaagaaaagagatgagagaccactctttccccaaattctcgcctctattgagctgctggcccgctcattgccaaaaattcaccgcagtgcatcagaaccctccttgaatcgggctggtttccaaacagaggattttagtctatatgcttgtgcttctccaaaaacacccatccaggcagggggatatggtgcgtttcctgtccactgaaacaaatgagtgagagagttcaggagagtagcaacaaaaggaaaataaatgaacatatgtttgcttatatgttaaattgaataaaatactctctttttttttaaggtgaaccaaagaacacttgtgtggttaaagactagatataatttttccccaaactaaaatttatacttaacattggatttttaacatccaagggttaaaatacatagacattgctaaaaattggcagagcctcttctagaggctttactttctgttccgggtttgtatcattcacttggttattttaagtagtaaacttcagtttctcatgcaacttttgttgccagctatcacatgtccactagggactccagaagaagaccctacctatgcctgtgtttgcaggtgagaagttggcagtcggttagcctgggttagataaggcaaactgaacagatctaatttaggaagtcagtagaatttaataattctattattattcttaataatttttctataactatttctttttataacaatttggaaaatgtggatgtcttttatttccttgaagcaataaactaagtttctttttataaaaa

SEQ ID NO: 105 - protein, 1011 aa, Homo sapiens; identical to SEQ ID NO: 50

SEQ ID NO: 106 - DNA, 2884 bp, Homo sapiens
gatgggattggggttttcccctcccatgtgctcaagactggcgctaaaagttttgagcttctcaaaagtctagagccaccgtccagggagcaggtagctgctgggctccggggacactttgcgttcgggctgggagcgtgctttccacgacggtgacacgcttccctggattggcagccagactgccttccgggtcactgccatggaggagccgcagtcagatcctagcgtcgagccccctctgagtcaggaaacattttcagacctatggaaactacttcctgaaaacaacgttctgtcccccttgccgtcccaagcaatggatgatttgatgctgtccccggacgatattgaacaatggttcactgaagacccaggtccagatgaagctcccagaatgccagaggctgctccccccgtggcccctgcaccagcagctcctacaccggcggcccctgcaccagccccctcctggcccctgtcatcttctgtcccttcccagaaaacctaccagggcagctacggtttccgtctgggcttcttgcattctgggacagccaagtctgtgacttgcacgtactcccctgccctcaacaagatgttttgccaactggccaagacctgccctgtgcagctgtgggttgattccacacccccgcccggcacccgcgtccgcgccatggccatctacaagcagtcacagcacatgacggaggttgtgaggcgctgcccccaccatgagcgctgctcagatagcgatggtctggcccctcctcagcatcttatccgagtggaaggaaatttgcgtgtggagtatttggatgacagaaacacttttcgacatagtgtggtggtgccctatgagccgcctgaggttggctctgactgtaccaccatccactacaactacatgtgtaacagttcctgcatgggcggcatgaaccggaggcccatcctcaccatcatcacactggaagactccagtggtaatctactgggacggaacagctttgaggtgcgtgtttgtgcctgtcctgggagagaccggcgcacagaggaagagaatctccgcaagaaaggggagcctcaccacgagctgcccccagggagcactaagcgagtctccttcccggccagtgtgcagctgcacacggcggtggagatgcaccactggtgcatccccttctctgtggatgggcagccggcaccgtctctgcgctggctcttcaatggctccgtgctcaatgagaccagcttcatcttcactgagttcctggagccggcagccaatgagaccgtgcggcacgggtgtctgcgcctcaaccagcccacccacgtcaacaacggcaactacacgctgctggctgccaaccccttcggccaggcctccgcctccatcatggctgccttcatggacaaccctttcgagttcaaccccgaggaccccatccctgtctccttctcgccggtggacactaacagcacatctggagacccggtggagaagaaggacgaaacaccttttggggtctcggtggctgtgggcctggccgtctttgcctgcctcttcctttctacgctgctccttgtgctcaacaaatgtggacggagaaacaagtttgggatcaaccgcccggctgtgctggctccagaggatgggctggccatgtccctgcatttcatgacattgggtggcagctccctgtcccccaccgagggcaaaggctctgggctccaaggccacatcatcgagaacccacaatacttcagtgatgcctgtgttcaccacatcaagcgccgggacatcgtgctcaagtgggagctgggggagggcgcctttgggaaggtcttccttgctgagtgccacaacctcctgcctgagcaggacaagatgctggtggctgtcaaggcactgaaggaggcgtccgagagtgctcggcaggacttccagcgtgaggctgagctgctcaccatgctgcagcaccagcacatcgtgcgcttcttcggcgtctgcaccgagggccgccccctgctcatggtctttgagtatatgcggcacggggacctcaaccgcttcctccgatcccatggacctgatgccaagctgctggctggtggggaggatgtggctccaggccccctgggtctggggcagctgctggccgtggctagccaggtcgctgcggggatggtgtacctggcgggtctgcattttgtgcaccgggacctggccacacgcaactgtctagtgggccagggactggtggtcaagattggtgattttggcatgagcagggatatctacagcaccgactattaccgtgtgggaggccgcaccatgctgcccattcgctggatgccgcccgagagcatcctgtaccgtaagttcaccaccgagagcgacgtgtggagcttcggcgtggtgctctgggagatcttcacctacggcaagcagccctggtaccagctctccaacacggaggcaatcgactgcatcacgcagggacgtgagttggagcggccacgtgcctgcccaccagaggtctacgccatcatgcggggctgctggcagcgggagccccagcaacgccacagcatcaaggatgtgcacgcccggctgcaagccctggcccaggcacctcctgtctacctggatgtcctgggctagggggccggcccaggggctgggagtggttagccggaatactggggcctgccctcagcatcccccatagctcccagcagccccagggtgatctcaaagtatctaattcaccctcagcatgtgggaagggacaggtgggggctgggagtagaggatgttcctgcttctctaggcaaggtcccgtcatagcaattatatttattatcccttgaaaaaaaa

SEQ ID NO: 107 - DNA, 2958 bp, Homo sapiens; identical to SEQ ID NO: 59

SEQ ID NO: 108 - DNA, 3125 bp, Homo sapiens; identical to SEQ ID NO: 60

SEQ ID NO: 109 - DNA, 4414 bp, Homo sapiens
gatgggattggggttttcccctcccatgtgctcaagactggcgctaaaagttttgagcttctcaaaagtctagagccaccgtccagggagcaggtagctgctgggctccggggacactttgcgttcgggctgggagcgtgctttccacgacggtgacacgcttccctggattggcagccagactgccttccgggtcactgccatggaggagccgcagtcagatcctagcgtcgagccccctctgagtcaggaaacattttcagacctatggaaactacttcctgaaaacaacgttctgtcccccttgccgtcccaagcaatggatgatttgatgctgtccccggacgatattgaacaatggttcactgaagacccaggtccagatgaagctcccagaatgccagaggctgctccccccgtggcccctgcaccagcagctcctacaccggcggcccctgcaccagccccctcctggcccctgtcatcttctgtcccttcccagaaaacctaccagggcagctacggtttccgtctgggcttcttgcattctgggacagccaagtctgtgacttgcacgtactcccctgccctcaacaagatgttttgccaactggccaagacctgccctgtgcagctgtgggttgattccacacccccgcccggcacccgcgtccgcgccatggccatctacaagcagtcacagcacatgacggaggttgtgaggcgctgcccccaccatgagcgctgctcagatagcgatggtctggcccctcctcagcatcttatccgagtggaaggaaatttgcgtgtggagtatttggatgacagaaacacttttcgacatagtgtggtggtgccctatgagccgcctgaggttggctctgactgtaccaccatccactacaactacatgtgtaacagttcctgcatgggcggcatgaaccggaggcccatcctcaccatcatcacactggaagactccagtggtaatctactgggacggaacagctttgaggtgcgtgtttgtgcctgtcctgggagagaccggcgcacagaggaagagaatctccgcaagaaaggggagcctcaccacgagctgcccccagggagcactaagcgagcactgcccaacaacaccagctcctctccccagccaaagaagaaaccactggatggagaatatttcacccttcagatgctacttgacttacgatggtgttacttcctgataaactcgtcgtaagttgaaaatattatccgtgggcgtgagcgcttcgagatgttccgagagctgaatgaggccttggaactcaaggatgcccaggctgggaaggagccaggggggagcagggctcactccagccacctgaagtccaaaaagggtcagtctacctcccgccataaaaaactcatgttcaagacagaagggcctgactcagactgacattctccacttcttgttccccactgacagcctcccacccccatctctccctcccctgccattttgggttttgggtctttgaacccttgcttgcaataggtgtgcgtcagaagcacccaggacttccatttgctttgtcccggggctccactgaacaagttggcctgcactggtgttttgttgtggggaggaggatggggagtaggacataccagcttagattttaaggtttttactgtgagggatgtttgggagatgtaagaaatgttcttgcagttaagggttagtttacaatcagccacattctaggtaggggcccacttcaccgtactaaccagggaagctgtccctcactgttgaattttctctaacttcaaggcccatatctgtgaaatgctggcatttgcacctacctcacagagtgcattgtgagggttaatgaaataatgtacatctggccttgaaaccaccttttattacatggggtctagaacttgacccccttgagggtgcttgttccctctccctgttggtcggtgggttggtagtttctacagttgggcagctggttaggtagagggagttgtcaagtctctgctggcccagccaaaccctgtctgacaacctcttggtgaaccttagtacctaaaaggaaatctcaccccatcccacaccctggaggatttcatctcttgtatatgatgatctggatccaccaagacttgttttatgctcagggtcaatttcttttttcttttttttttttttttttctttttctttgagactgggtctcgctttgttgcccaggctggagtggagtggcgtgatcttggcttactgcagcctttgcctccccggctcgagcagtcctgcctcagcctccggagtagctgggaccacaggttcatgccaccatggccagccaacttttgcatgttttgtagagatggggtctcacagtgttgcccaggctggtctcaaactcctgggctcaggcgatccacctgtctcagcctcccagagtgctgggattacaattgtgagccaccacgtccagctggaagggtcaacatcttttacattctgcaagcacatctgcattttcaccccacccttcccctccttctccctttttatatcccatttttatatcgatctcttattttacaataaaactttgctgccacctgtgtgtctgaggggtgtctccttcccggccagtgtgcagctgcacacggcggtggagatgcaccactggtgcatccccttctctgtggatgggcagccggcaccgtctctgcgctggctcttcaatggctccgtgctcaatgagaccagcttcatcttcactgagttcctggagccggcagccaatgagaccgtgcggcacgggtgtctgcgcctcaaccagcccacccacgtcaacaacggcaactacacgctgctggctgccaaccccttcggccaggcctccgcctccatcatggctgccttcatggacaaccctttcgagttcaaccccgaggaccccatccctgtctccttctcgccggtggacactaacagcacatctggagacccggtggagaagaaggacgaaacaccttttggggtctcggtggctgtgggcctggccgtctttgcctgcctcttcctttctacgctgctccttgtgctcaacaaatgtggacggagaaacaagtttgggatcaaccgcccggctgtgctggctccagaggatgggctggccatgtccctgcatttcatgacattgggtggcagctccctgtcccccaccgagggcaaaggctctgggctccaaggccacatcatcgagaacccacaatacttcagtgatgcctgtgttcaccacatcaagcgccgggacatcgtgctcaagtgggagctgggggagggcgcctttgggaaggtcttccttgctgagtgccacaacctcctgcctgagcaggacaagatgctggtggctgtcaaggcactgaaggaggcgtccgagagtgctcggcaggacttccagcgtgaggctgagctgctcaccatgctgcagcaccagcacatcgtgcgcttcttcggcgtctgcaccgagggccgccccctgctcatggtctttgagtatatgcggcacggggacctcaaccgcttcctccgatcccatggacctgatgccaagctgctggctggtggggaggatgtggctccaggccccctgggtctggggcagctgctggccgtggctagccaggtcgctgcggggatggtgtacctggcgggtctgcattttgtgcaccgggacctggccacacgcaactgtctagtgggccagggactggtggtcaagattggtgattttggcatgagcagggatatctacagcaccgactattaccgtgtgggaggccgcaccatgctgcccattcgctggatgccgcccgagagcatcctgtaccgtaagttcaccaccgagagcgacgtgtggagcttcggcgtggtgctctgggagatcttcacctacggcaagcagccctggtaccagctctccaacacggaggcaatcgactgcatcacgcagggacgtgagttggagcggccacgtgcctgcccaccagaggtctacgccatcatgcggggctgctggcagcgggagccccagcaacgccacagcatcaaggatgtgcacgcccggctgcaagccctggcccaggcacctcctgtctacctggatgtcctgggctagggggccggcccaggggctgggagtggttagccggaatactggggcctgccctcagcatcccccatagctcccagcagccccagggtgatctcaaagtatctaattcaccctcagcatgtgggaagggacaggtgggggctgggagtagaggatgttcctgcttctctaggcaaggtcccgtcatagcaattatatttattatcccttgaaaaaaaa

SEQ ID NO: 110 - DNA, 4065 bp, Homo sapiens
aggaggacctattagagcctttgccccggcgtcggtgactcagtgttcgcgggagcgccgcacctacaccagccaacccagatcccgaggtccgacagcgcccggcccagatccccacgcctgccaggagcaagccgagagccagccggccggcgcactccgactccgagcagtctctgtccttcgacccgagccccgcgccctttccgggacccctgccccgcgggcagcgctgccaacctgccggccatggagaccccgtcccagcggcgcgccacccgcagcggggcgcaggccagctccactccgctgtcgcccacccgcatcacccggctgcaggagaaggaggacctgcaggagctcaatgatcgcttggcggtctacatcgaccgtgtgcgctcgctggaaacggagaacgcagggctgcgccttcgcatcaccgagtctgaagaggtggtcagccgcgaggtgtccggcatcaaggccgcctacgaggccgagctcggggatgcccgcaagacccttgactcagtagccaaggagcgcgcccgcctgcagctggagctgagcaaagtgcgtgaggagtttaaggagctgaaagcgcgcaataccaagaaggagggtgacctgatagctgctcaggctcggctgaaggacctggaggctctgctgaactccaaggaggccgcactgagcactgctctcagtgagaagcgcacgctggagggcgagctgcatgatctgcggggccaggtggccaaggaggatccaaagtgggaattccctcggaagaacttggttcttggaaaaactctaggagaaggcgaatttggaaaagtggtcaaggcaacggccttccatctgaaaggcagagcagggtacaccacggtggccgtgaagatgctgaaagagaacgcctccccgagtgagcttcgagacctgctgtcagagttcaacgtcctgaagcaggtcaaccacccacatgtcatcaaattgtatggggcctgcagccaggatggcccgctcctcctcatcgtggagtacgccaaatacggctccctgcggggcttcctccgcgagagccgcaaagtggggcctggctacctgggcagtggaggcagccgcaactccagctccctggaccacccggatgagcgggccctcaccatgggcgacctcatctcatttgcctggcagatctcacaggggatgcagtatctggccgagatgaagctcgttcatcgggacttggcagccagaaacatcctggtagctgaggggcggaagatgaagatttcggatttcggcttgtcccgagatgtttatgaagaggattcctacgtgaagaggagccagggtcggattccagttaaatggatggcaattgaatccctttttgatcatatctacaccacgcaaagtgatgtatggtcttttggtgtcctgctgtgggagatcgtgaccctagggggaaacccctatcctgggattcctcctgagcggctcttcaaccttctgaagaccggccaccggatggagaggccagacaactgcagcgaggagatgtaccgcctgatgctgcaatgctggaagcaggagccggacaaaaggccggtgtttgcggacatcagcaaagacctggagaagatgatggttaagaggagagactacttggaccttgcggcgtccactccatctgactccctgatttatgacgacggcctctcagaggaggagacaccgctggtggactgtaataatgcccccctccctcgagccctcccttccacatggattgaaaacaaactctatggcatgtcagacccgaactggcctggagagagtcctgtaccactcacgagagctgatggcactaacactgggtttccaagatatccaaatgatagtgtatatgctaactggatgctttcaccctcagcggcaaaattaatggacacgtttgatagttaacatttctttgtgaaaggtaatggactcacaaggggaagaaacatgctgagaatggaaagtctaccggccctttctttgtgaacgtcacattggccgagccgtgttcagttcccaggtggcagactcgtttttggtagtttgttttaacttccaaggtggttttacttctgatagccggtgattttccctcctagcagacatgccacaccgggtaagagctctgagtcttagtggttaagcattcctttctcttcagtgcccagcagcacccagtgttggtctgtgtccatcagtgaccaccaacattctgtgttcacatgtgtgggtccaacacttactacctggtgtatgaaattggacctgaactgttggatttttctagttgccgccaaacaaggcaaaaaaatttaaacatgaagcacacacacaaaaaaggcagtaggaaaaatgctggccctgatgacctgtccttattcagaatgagagactgcggggggggcctgggggtagtgtcaatgcccctccagggctggaggggaagaggggccccgaggatgggcctgggctcagcattcgagatcttgagaatgatttttttttaatcatgcaacctttccttaggaagacatttggttttcatcatgattaagatgattcctagatttagcacaatggagagattccatgccatctttactatgtggatggtggtatcagggaagagggctcacaagacacatttgtcccccgggcccaccacatcatcctcacgtgttcggtactgagcagccactacccctgatgagaacagtatgaagaaagggggctgttggagtcccagaattgctgacagcagaggctttgctgctgtgaatcccacctgccaccagcctgcagcacaccccacagccaagtagaggcgaaagcagtggctcatcctacctgttaggagcaggtagggcttgtactcactttaatttgaatcttatcaacttactcataaagggacaggctagctagctgtgttagaagtagcaatgacaatgaccaaggactgctacacctctgattacaattctgatgtgaaaaagatggtgtttggctcttatagagcctgtgtgaaaggcccatggatcagctcttcctgtgtttgtaatttaatgctgctacaagatgtttctgtttcttagattctgaccatgactcataagcttcttgtcattcttcattgcttgtttgtggtcacagatgcacaacactcctccagtcttgtgggggcagcttttgggaagtctcagcagctcttctggctgtgttgtcagcactgtaacttcgcagaaaagagtcggattaccaaaacactgcctgctcttcagacttaaagcactgataggacttaaaatagtctcattcaaatactgtattttatataggcatttcacaaaaacagcaaaattgtggcattttgtgaggccaaggcttggatgcgtgtgtaatagagccttgtggtgtgtgcgcacacacccagagggagagtttgaaaaatgcttattggacacgtaacctggctctaatttgggctgtttttcagatacactgtgataagttcttttacaaatatctatagacatggtaaacttttggttttcagatatgcttaatgatagtcttactaaatgcagaaataagaataaactttctcaaattattaaaaatgcctacacagtaagtgtgaattgctgcaacaggtttgttctcaggagggtaagaactccaggtctaaacagctgacccagtgatggggaatttatccttgaccaatttatccttgaccaataacctaattgtctattcctgagttataaaagtccccatccttattagctctactggaattttcatacacgtaaatgcagaagttactaagtattaagtattactgagtattaagtagtaatctgtcagttattaaaatttgtaaaatctatttatgaaaggtcattaaaccagatcatgttcctttttttgtaatcaaggtgactaagaaaatcagttgtgtaaataaaatcatgtatcataaaaaaaaaaaaaaaa

SEQ ID NO: 111 - protein, 599 aa, Homo sapiens
METPSQRRATRSGAQASSTPLSPTRITRLQEKEDLQELNDRLAVYIDRVRSLETENAGLRLRITESEEVVSREVSGIKAAYEAELGDARKTLDSVAKERARLQLELSKVREEFKELKARNTKKEGDLIAAQARLKDLEALLNSKEAALSTALSEKRTLEGELHDLRGQVAKEDPKWEFPRKNLVLGKTLGEGEFGKVVKATAFHLKGRAGYTTVAVKMLKENASPSELRDLLSEFNVLKQVNHPHVIKLYGACSQDGPLLLIVEYAKYGSLRGFLRESRKVGPGYLGSGGSRNSSSLDHPDERALTMGDLISFAWQISQGMQYLAEMKLVHRDLAARNILVAEGRKMKISDFGLSRDVYEEDSYVKRSQGRIPVKWMAIESLFDHIYTTQSDVWSFGVLLWEIVTLGGNPYPGIPPERLFNLLKTGHRMERPDNCSEEMYRLMLQCWKQEPDKRPVFADISKDLEKMMVKRRDYLDLAASTPSDSLIYDDGLSEEETPLVDCNNAPLPRALPSTWIENKLYGMSDPNWPGESPVPLTRADGTNTGFPRYPNDSVYANWMLSPSAAKLMDTFDSHFFVKGNGLTRGRNMLRMESLPALSL

SEQ ID NO: 112 - DNA, 6026 bp, Homo sapiens
ggaggtcggcgcagctgcccctttgggctttggctctggactggagcgcagcatccttcgaggctgcagccgccacggctgttgccgtaagcaatcctcctgcctcagcctcccgagtagctgggactcgggaccagcctcccgagtattggtcagatgacatttaccatcaccgttttcttcttctttcatcatcatcatcatcaccattgccactaccaccacctccaaggccactaccaccacagcatctctgttcctccatcagagctcttcaagttctgtaaaggcagattctctaaaggcatgcctggtggcatcacgtttttcacatctccgcatctggaccctgcccaagcgaaggctgatctaggcagtctcattgctggagatgactgtcagctgctttctctgcatagccaccatcacatgcctcaccactggagcctgggaagcctgaccacaaaccggcatctccaaggcatgaataattaggtaggcataatggaaggcactcattgtaccctccaattgcataagcccattacggaactctgctacatcagcttctgtcttccaaagggggaagtcagaggattttcatacaagggcactgtaactctagacagatccaataaaggttttcataactgctaccaagtcagggaggagtcagacatcatcagcctcagccaggagccggacgaacatccaggcgacatatttttcaagcagactcccacgaaagacattctaactgagctgtacaaactcacaacagagagggagagactgctaaccaatctcctgagctcagaccacatcctggggatcacgatggggaaccaggaggggaagctgcaagagctgtccgtgagcctggcccccgaggatgactgtttccagagtgctggtgactggcagggagagctccccgtgggccctctcaataagaggagcacccacgggaacaaaaagcctcggaggtctagtggaaggagagagagctttggggcccttccacagaagaggaccaaaagaaaagggcgtggaggccgagaatcagctcctctgatgggcaaggacaagatctgttccagccactcccttcctctttctagaacaaggcctaacctttgggtactagaggagaaaggaaatctgctcccgaatggggcacttgcctgctccctgcagaggagagagagctgccccccagatattcccaagacgccagacacagaccttggctttgggagctttgagacggctttcaaggacactgggcttggaagagaagtgctgccccctgactgcagctccacagaggcaggaggggatggcattcggaggccgccgagcgggctggagcatcagcaaacaggtttgtctgaaagtcaccaggaccctgagaagcatccagaggcagaaaaggatgagatggagaagccggctaagcggacttgcaagcagaaacctgtctccaaagtggtggccaaagttcaggacctgtcctcccaggtacaaagagtagttaaaacgcattctaagggtaaggagacgattgccattcgcccagcagcccacgctgagtttgtacccaaagccgacttgctcaccctcccgggagctgaggctggggctcatggctccaggcggcagggcaaggagcggcaaggggataggtcatcgcagtcgccagccggggaaacagcctccatttctagtgtgtcggccagtgccgagggggccgtgaacaaggtccccctgaaggtgatagagagtgagaagttagatgaagcccctgaggggaaaagactgggcttccctgtccacacgagtgtccctcacactcgcccagaaacgagaaacaagaggagagccgggttgccccttggtggccacaagtccttgtttctggatctgccccacaaagtaggtcctgactcctcacaacccagaggtgataagaagaagccatccccaccagcaccggcagctcttggcaaggtgtttaataattcagcctcgcagtccagcacacacaaacagacgtcacctgttccctcgcctctgtctccaaggctccccagccctcagcagcatcacaggatcctccggctccctgcattgcctggtgagagggaagctgctcttaatgactctccttgtagaaagagccgtgtcttctctgggtgcgtctctgctgacaccttggagccaccatcctctgcaaaggtcacggagaccaaaggagccagcccggccttcctcagagcaggccaacctcggttggtgcctggggaaactttggaaaagagcttggggccagggaagaccacagctgagccccagcaccagtcacctccaggtatctcctctgagggctttccctgggacggcttcaatgagcagacacctaaagaccttcccaacagagatggaggcgcgtgggttctgggctacagagcgggaccagcctgtccatttttgcttcatgaggaaagggagaagtcaaacaggagcgaattgtacttggatctccatcctgaccacagcctgactgagcaggatgacaggactcctggcagacttcaagctgtctggccacccccaaagacaaaagacacagaagaaaaagtgggactgaagtacactgaagcagaataccaagctgctattttacacttgaagagggagcacaaagaagaaattgaaaacctgcaggcacagtttgaacttcgggcatttcatatccggggcgagcatgcaatgataacagcgagactagaagaaaccattgaaaatctgaaacacgagctagaacacagatggcgagggggttgtgaagagaggaaagatgtgtgcatttccaccgatgatgactgccctccaaagaccttcagaaatgtgtgcgtccagacagacagagagaccttcctcaagccctgtgaaagtgaaagcaagacaaccagaagtaatcaattagtacccaaaaagctgaatatctcctctttaagccagctctcacccccaaatgaccacaaagacatccatgcagcactccagccaatggagggcatggcatcaaatcagcagaaggcattgcctccgcctcccgcatccatccctccccctccgcccctcccctcaggacttggatctttgtctcccgcacctccaatgccacctgtgagtgctgggccaccgctaccacctccgcctcctccaccgccacctctacctccaccttcaagtgctggacctccaccacccccacccccacccccacttcctaactcccctgccccacccaaccctggagggcctcctcctgctccaccacccccaggacttgcacccccacctccccctggactcttctttggacttggctcttcttccagtcaatgtcctcgaaaaccagccatcgagcccagttgtcccatgaagcctttatattggactaggatacaaataagtgataggagccaaaatgctacaccaaccttatgggactccttagaagaacctgacattcgggaccccagtgaatttgagtatttattctccaaagacacaactcaacagaagaaaaaacctctgtcagagacttatgagaagaaaaacaaggtcaaaaagatcatcaaattgttggatggaaaacgatctcaaactgtgggaatcttgatatctagtttacatttagaaatgaaggatatccaacaggccattttcaatgtggatgactccgtggttgatctggagaccctggcagccttatatgaaaacagagcccaagaggatgagctggttaaaataagaaagtattacgagacatccaaagaagaagaactgaagctgctggataaacctgagcaatttttacatgagttagcccagattcctaattttgctgaacgtgcccagtgcataatcttcagatctgtcttttctgagggtatcacctccttgcacagaaaggtagagatcatcacgcgagcttctaaggacttgctgcacgtgaagagcgtgaaggatattttagctctcatcttggcttttggaaattatatgaatggaggaaataggactcggggacaagccgatggatatagcttagaaattctgcccaaactcaaggatgtcaaaagtcgggataatgggattaatctggtggactacgttgttaagtattacctgcgttactatgatcaggaagctggaacagaaaagagtgttttccccttgccggaaccacaggatttctttctggcctcccaagtcaagtttgaagacctcataaaagatttgagaaaactgaagaggcaactagaagcaagtgagaaacagatggtggtggtgtgcaaggagtccccaaaggagtatctccagcctttcaaggacaaactagaggagttcttccaaaaagccaaaaaagagcataagatggaagaaagtcacttggagaatgcacagaaaagttttgaaacaacagtacgatattttgggatgaagccaaagtctggtgagaaggagatcacacccagctacgtgtttatggtgtggtatgagttctgcagtgacttcaagacaatttggaaacgggagagtaaaaacatatctaaagaaagtactcttccaacccaagaggagattgaaaatcttcctgccttccctcgggaaaaactgactctgcgtctcttgctgggaagtggagcctttggagaagtgtatgaaggaacagcagtggacatcttaggagttggaagtggagaaatcaaagtagcagtgaagactttgaagaagggttccacagaccaggagaagattgaattcctgaaggaggcacatctgatgagcaaatttaatcatcccaacattctgaagcagcttggagtttgtctgctgaatgaaccccaatacattatcctggaactgatggagggaggagaccttcttacttatttgcgtaaagcccggatggcaacgttttatggtcctttactcaccttggttgaccttgtagacctgtgtgtagatatttcaaaaggctgtgtctacttggaacggatgcatttcattcacagggatctggcagctagaaattgccttgtttccgtgaaagactataccagtccacggatagtgaagattggagactttggactcgccagagacatctataaaaatgattactatagaaagagaggggaaggcctgctcccagttcggtggatggctccagaaagtttgatggatggaatcttcactactcaatctgatgtatggtcttttggaattctgatttgggagattttaactcttggtcatcagccttatccagctcattccaaccttgatgtgttaaactatgtgcaaacaggagggagactggagccaccaagaaattgtcctgatgatctgtggaatttaatgacccagtgctgggctcaagaacccgaccaaagacctacttttcatagaattcaggaccaacttcagttattcagaaattttttcttaaatagcatttataagtccagagatgaagcaaacaacagtggagtcataaatgaaagctttgaaggtgaagatggcgatgtgatttgtttgaattcagatgacattatgccagttgctttaatggaaacgaagaaccgagaagggttaaactatatggtacttgctacagaatgtggccaaggtgaagaaaagtctgagggtcctctaggctcccaggaatctgaatcttgtggtctgaggaaagaagagaaggaaccacatgcagacaaagatttctgccaagaaaaacaagtggcttactgcccttctggcaagcctgaaggcctgaactatgcctgtctcactcacagtggatatggagatgggtctgattaatagcgttgtttgggaaatagagagttgagataaacactctcattcagtagttactgaaagaaaactctgctagaatgataaatgtcatggtggtctataactccaaataaacaatgcaacgttcc

SEQ ID NO: 113 - protein, 1798 aa, Homo sapiens
MEGTHCTLQLHKPITELCYISFCLPKGEVRGFSYKGTVTLDRSNKGFHNCYQVREESDIISLSQEPDEHPGDIFFKQTPTKDILTELYKLTTERERLLTNLLSSDHILGITMGNQEGKLQELSVSLAPEDDCFQSAGDWQGELPVGPLNKRSTHGNKKPRRSSGRRESFGALPQKRTKRKGRGGRESAPLMGKDKICSSHSLPLSRTRPNLWVLEEKGNLLPNGALACSLQRRESCPPDIPKTPDTDLGFGSFETAFKDTGLGREVLPPDCSSTEAGGDGIRRPPSGLEHQQTGLSESHQDPEKHPEAEKDEMEKPAKRTCKQKPVSKVVAKVQDLSSQVQRVVKTHSKGKETIAIRPAAHAEFVPKADLLTLPGAEAGAHGSRRQGKERQGDRSSQSPAGETASISSVSASAEGAVNKVPLKVIESEKLDEAPEGKRLGFPVHTSVPHTRPETRNKRRAGLPLGGHKSLFLDLPHKVGPDSSQPRGDKKKPSPPAPAALGKVFNNSASQSSTHKQTSPVPSPLSPRLPSPQQHHRILRLPALPGEREAALNDSPCRKSRVFSGCVSADTLEPPSSAKVTETKGASPAFLRAGQPRLVPGETLEKSLGPGKTTAEPQHQSPPGISSEGFPWDGFNEQTPKDLPNRDGGAWVLGYRAGPACPFLLHEEREKSNRSELYLDLHPDHSLTEQDDRTPGRLQAVWPPPKTKDTEEKVGLKYTEAEYQAAILHLKREHKEEIENLQAQFELRAFHIRGEHAMITARLEETIENLKHELEHRWRGGCEERKDVCISTDDDCPPKTFRNVCVQTDRETFLKPCESESKTTRSNQLVPKKLNISSLSQLSPPNDHKDIHAALQPMEGMASNQQKALPPPPASIPPPPPLPSGLGSLSPAPPMPPVSAGPPLPPPPPPPPPLPPPSSAGPPPPPPPPPLPNSPAPPNPGGPPPAPPPPGLAPPPPPGLFFGLGSSSSQCPRKPAIEPSCPMKPLYWTRIQISDRSQNATPTLWDSLEEPDIRDPSEFEYLFSKDTTQQKKKPLSETYEKKNKVKKIIKLLDGKRSQTVGILISSLHLEMKDIQQAIFNVDDSVVDLETLAALYENRAQEDELVKIRKYYETSKEEELKLLDKPEQFLHELAQIPNFAERAQCIIFRSVFSEGITSLHRKVEIITRASKDLLHVKSVKDILALILAFGNYMNGGNRTRGQADGYSLEILPKLKDVKSRDNGINLVDYVVKYYLRYYDQEAGTEKSVFPLPEPQDFFLASQVKFEDLIKDLRKLKRQLEASEKQMVVVCKESPKEYLQPFKDKLEEFFQKAKKEHKMEESHLENAQKSFETTVRYFGMKPKSGEKEITPSYVFMVWYEFCSDFKTIWKRESKNISKESTLPTQEEIENLPAFPREKLTLRLLLGSGAFGEVYEGTAVDILGVGSGEIKVAVKTLKKGSTDQEKIEFLKEAHLMSKFNHPNILKQLGVCLLNEPQYIILELMEGGDLLTYLRKARMATFYGPLLTLVDLVDLCVDISKGCVYLERMHFIHRDLAARNCLVSVKDYTSPRIVKIGDFGLARDIYKNDYYRKRGEGLLPVRWMAPESLMDGIFTTQSDVWSFGILIWEILTLGHQPYPAHSNLDVLNYVQTGGRLEPPRNCPDDLWNLMTQCWAQEPDQRPTFHRIQDQLQLFRNFFLNSIYKSRDEANNSGVINESFEGEDGDVICLNSDDIMPVALMETKNREGLNYMVLATECGQGEEKSEGPLGSQESESCGLRKEEKEPHADKDFCQEKQVAYCPSGKPEGLNYACLTHSGYGDGSD
